(19) United States
(12) Patent Application Publication
(10) Pub. No.: US 2018/0243435 A1
(43) Pub. Date: Aug. 30, 2018

(54) ANTI-DLL3 ANTIBODY DRUG CONJUGATES AND METHODS OF USE

(71) Applicant: ABBVIE STEMCENTRX LLC, NORTH CHICAGO, IL (US)

(72) Inventors: SCOTT J. DYLLA, EMERALD HILLS, CA (US); BRIAN SLINGERLAND, SOUTH SAN FRANCISCO, CA (US); TAE HAN, WOODINVILLE, WA (US); JOHN PEATTIE, SAN FRANCISCO, CA (US); HOLGER KARSUNKY, REDWOOD CITY, CA (US); WADE C. ANDERSON, FAIRFIELD, CA (US)

(73) Assignee: ABBVIE STEMCENTRX LLC, NORTH CHICAGO, IL (US)

(21) Appl. No.: 15/753,509

(22) PCT Filed: Aug. 19, 2016
(86) PCT No.: PCT/US16/47870

§ 371 Date: Feb. 19, 2018

Related U.S. Application Data
(60) Provisional application No. 62/207,830, filed on Aug. 20, 2015.
(60) Provisional application No. 62/323,998, filed on Apr. 18, 2016.
(60) Provisional application No. 62/373,906, filed on Aug. 11, 2016.

(51) Int. Cl. A61K 47/68; C07K 16/18; A61P 35/00

(52) U.S. Cl. CPC A61K 47/6849; C07K 16/18; C07K 2317/34; A61P 35/00; C07K 2317/24; A61K 47/6803

(57) ABSTRACT

Provided are novel anti-DLL3 antibodies and antibody drug conjugates, and methods of using such anti-DLL3 antibodies and antibody drug conjugates to treat cancer.

### CROSS REFERENCED APPLICATIONS

[0001] This application claims the benefit of U.S. Provisional Application No. 62/207,830 filed on 20 Aug. 2015, U.S. Provisional Application No. 62/323,998 filed on 18 Apr. 2016 and U.S. Provisional Application No. 62/373,906 filed on 11 Aug. 2016, each of which is incorporated herein by reference in its entirety.

### SEQUENCE LISTING

[0002] This application contains a sequence listing which has been submitted in ASCII format via EFS-Web and is hereby incorporated by reference in its entirety. Said ASCII copy, created on Aug. 8, 2016, is named sc1607_p3_Sequence_Listing_08082016 and is 591 KB (605,521 bytes) in size.

### FIELD OF THE INVENTION

[0003] This application generally relates to novel compounds and compositions and methods of administering anti-DLL3 antibodies or immunoreactive fragments thereof, including antibody drug conjugates (ADCs), comprising the same for the treatment, diagnosis or prophylaxis of cancer and any recurrence or metastasis thereof. Selected embodiments of the invention provide for the administration of such anti-DLL3 antibodies or antibody drug conjugates for the treatment of cancer comprising a reduction in tumorigenic cell frequency.

### BACKGROUND OF THE INVENTION

[0004] Differentiation and proliferation of stem cells and progenitor cells are normal ongoing processes that act in concert to support tissue growth during organogenesis, cell repair and cell replacement. The system is tightly regulated to ensure that only appropriate signals are generated based on the needs of the organism. Cell proliferation and differentiation normally occur only as necessary for the replacement of damaged or dying cells or for growth. However, disruption of these processes can be triggered by many factors including the under- or overabundance of various signaling chemicals, the presence of altered microenvironments, genetic mutations or a combination thereof. Disruption of normal cellular proliferation and/or differentiation can lead to various disorders including proliferative diseases such as cancer.

[0005] Conventional therapeutic treatments for cancer include chemotherapy, radiotherapy and immunotherapy. Often these treatments are ineffective and surgical resection may not provide a viable clinical alternative. Limitations in the current standard of care are particularly evident in those cases where patients undergo first line treatments and subsequently relapse. In such cases refractory tumors, often aggressive and incurable, frequently arise. The overall survival rate for many solid tumors have remained largely unchanged over the years due, at least in part, to the failure of existing therapies to prevent relapse, tumor recurrence and metastasis. There remains therefore a great need to develop more targeted and potent therapies for proliferative disorders. The current invention addresses this need.

### SUMMARY OF THE INVENTION

[0006] In a broad aspect the present invention provides novel compounds and compositions comprising isolated antibodies, and/or corresponding antibody drug conjugates, which specifically bind to human DLL3 determinant. In certain embodiments the DLL3 determinant is a DLL3 protein expressed on tumor cells while in other embodiments the DLL3 determinant is expressed on tumor initiating cells. In selected aspects the DLL3 ADC compositions will comprise lyophilized compositions. In other aspects the invention provides novel methods of administering the disclosed compounds or compositions including particularly effective dosing regimens and the dosing of certain patient subpopulations identified as set forth herein. As discussed in more detail below, the disclosed methodology relating to patient selection and patient dosing can prove particularly efficacious due, at least in part, to the resulting favorable therapeutic index and treatment susceptible population. In yet other embodiments the present invention provides for certain therapeutic regimens comprising a combination of DLL3 ADCs and immunotherapeutic compounds, including checkpoint inhibitors, which appear to be particularly efficacious.

[0007] In selected aspects the antibodies of the invention bind to a DLL3 protein and compete for binding with a reference antibody that binds to an epitope on human DLL3 protein. In certain embodiments the present invention comprises DLL3 antibodies or ADCs wherein the antibody or ADC binding domain binds specifically to human DLL3 (hDLL3) and comprises or competes for binding with an antibody comprising: a light chain variable region (VL) of SEQ ID NO: 21 and a heavy chain variable region (VH) of SEQ ID NO: 23; or a VL of SEQ ID NO: 25 and a VH of SEQ ID NO: 27; or a VL of SEQ ID NO: 29 and a VH of SEQ ID NO: 31; or a VL of SEQ ID NO: 33 and a VH of SEQ ID NO: 35; or a VL of SEQ ID NO: 37 and a VH of SEQ ID NO: 39; or a VL of SEQ ID NO: 41 and a VH of SEQ ID NO: 43; or a VL of SEQ ID NO: 45 and a VH of SEQ ID NO: 47; or a VL of SEQ ID NO: 49 and a VH of SEQ ID NO: 51; or a VL of SEQ ID NO: 53 and a VH of SEQ ID NO: 55; or a VL of SEQ ID NO: 57 and a VH of SEQ ID NO: 59; or a VL of SEQ ID NO: 61 and a VH of SEQ ID NO: 63; or a VL of SEQ ID NO: 65 and a VH of SEQ ID NO: 67; or a VL of SEQ ID NO: 69 and a VH of SEQ ID NO: 71; or a VL of SEQ ID NO: 73 and a VH of SEQ ID NO: 75; or a VL of SEQ ID NO: 77 and a VH of SEQ ID NO: 79; or a VL of SEQ ID NO: 81 and a VH of SEQ ID NO: 83; or a VL of SEQ ID NO: 85 and a VH of SEQ ID NO: 87; or a VL of SEQ ID NO: 89 and a VH of SEQ ID NO: 91; or a VL of SEQ ID NO: 93 and a VH of SEQ ID NO: 95; or a VL of SEQ ID NO: 97 and a VH of SEQ ID NO: 99; or a VL of SEQ ID NO: 101 and a VH of SEQ ID NO: 103; or a VL of SEQ ID NO: 105 and a VH of SEQ ID NO: 107; or a VL of SEQ ID NO: 109 and a VH of SEQ ID NO: 111; or a VL of SEQ ID NO: 113 and a VH of SEQ ID NO: 115; or a VL of SEQ ID NO: 117 and a VH of SEQ ID NO: 119; or a VL of SEQ ID NO: 121 and a VH of SEQ ID NO: 123; or a VL of SEQ ID NO: 125 and a VH of SEQ ID NO: 127; or a VL of SEQ ID NO: 129 and a VH of SEQ ID NO: 131; or a VL of SEQ ID NO: 133 and a VH of SEQ ID NO: 135; or a VL of SEQ ID NO: 137 and a VH of SEQ ID NO: 139; or a VL of SEQ ID NO: 141 and a VH of SEQ ID NO: 143; or a VL of SEQ ID NO: 145 and a VH of SEQ ID NO: 147; or a VL of SEQ ID NO: 149 and a VH of SEQ ID NO: 151; or a VL of SEQ ID NO: 153 and a VH of SEQ ID NO: 155; or a VL of SEQ ID NO: 157 and a VH of SEQ ID NO: 159; or a VL of SEQ ID NO: 161 and a VH of SEQ ID NO: 163; or a VL of SEQ ID NO: 165 and a VH of SEQ ID NO: 167; or a VL of SEQ ID NO: 169 and a VH of SEQ ID NO: 171; or a VL of SEQ ID NO: 173 and a VH of SEQ ID NO: 175; or a VL of SEQ ID NO: 177 and a VH of SEQ ID NO: 179; or a VL of SEQ ID NO: 181 and a VH of SEQ ID NO: 183; or a VL of SEQ ID NO: 185 and a VH of SEQ ID NO: 187; or a VL of SEQ ID NO: 189 and a VH of SEQ ID NO: 191; or a VL of SEQ ID NO: 193 and a VH of SEQ ID NO: 195; or a VL of SEQ ID NO: 197 and a VH of SEQ ID NO: 199; or a VL of SEQ ID NO: 201 and a VH of SEQ ID NO: 203; or a VL of SEQ ID NO: 205 and a VH of SEQ ID NO: 207; or a VL of SEQ ID NO: 209 and a VH of SEQ ID NO: 211; or a VL of SEQ ID NO: 213 and a VH of SEQ ID NO: 215; or a VL of SEQ ID NO: 217 and a VH of SEQ ID NO: 219; or a VL of SEQ ID NO: 221 and a VH of SEQ ID NO: 223; or a VL of SEQ ID NO: 225 and a VH of SEQ ID NO: 227; or a VL of SEQ ID NO: 229 and a VH of SEQ ID NO: 231; or a VL of SEQ ID NO: 233 and a VH of SEQ ID NO: 235; or a VL of SEQ ID NO: 237 and a VH of SEQ ID NO: 239; or a VL of SEQ ID NO: 241 and a VH of SEQ ID NO: 243; or a VL of SEQ ID NO: 245 and a VH of SEQ ID NO: 247; or a VL of SEQ ID NO: 249 and a VH of SEQ ID NO: 251; or a VL of SEQ ID NO: 253 and a VH of SEQ ID NO: 255; or a VL of SEQ ID NO: 257 and a VH of SEQ ID NO: 259; or a VL of SEQ ID NO: 261 and a VH of SEQ ID NO: 263; or a VL of SEQ ID NO: 265 and a VH of SEQ ID NO: 267; or a VL of SEQ ID NO: 269 and a VH of SEQ ID NO: 271; or a VL of SEQ ID NO: 273 and a VH of SEQ ID NO: 275; or a VL of SEQ ID NO: 277 and a VH of SEQ ID NO: 279; or a VL of SEQ ID NO: 281 and a VH of SEQ ID NO: 283; or a VL of SEQ ID NO: 285 and a VH of SEQ ID NO: 287; or a VL of SEQ ID NO: 289 and a VH of SEQ ID NO: 291; or a VL of SEQ ID NO: 293 and a VH of SEQ ID NO: 295; or a VL of SEQ ID NO: 297 and a VH of SEQ ID NO: 299; or a VL of SEQ ID NO: 301 and a VH of SEQ ID NO: 303; or a VL of SEQ ID NO: 305 and a VH of SEQ ID NO: 307; or a VL of SEQ ID NO: 309 and a VH of SEQ ID NO: 311; or a VL of SEQ ID NO: 313 and a VH of SEQ ID NO: 315; or a VL of SEQ ID NO: 317 and a VH of SEQ ID NO: 319; or a VL of SEQ ID NO: 321 and a VH of SEQ ID NO: 323; or a VL of SEQ ID NO: 325 and a VH of SEQ ID NO: 327; or a VL of SEQ ID NO: 329 and a VH of SEQ ID NO: 331; or a VL of SEQ ID NO: 333 and a VH of SEQ ID NO: 335; or a VL of SEQ ID NO: 337 and a VH of SEQ ID NO: 339; or a VL of SEQ ID NO: 341 and a VH of SEQ ID NO: 343; or a VL of SEQ ID NO: 345 and a VH of SEQ ID NO: 347; or a VL of SEQ ID NO: 349 and a VH of SEQ ID NO: 351; or a VL of SEQ ID NO: 353 and a VH of SEQ ID NO: 355; or a VL of SEQ ID NO: 357 and a VH of SEQ ID NO: 359; or a VL of SEQ ID NO: 361 and a VH of SEQ ID NO: 363; or a VL of SEQ ID NO: 365 and a VH of SEQ ID NO: 367; or a VL of SEQ ID NO: 369 and a VH of SEQ ID NO: 371; or a VL of SEQ ID NO: 373 and a VH of SEQ ID NO: 375; or a VL of SEQ ID NO: 377 and a VH of SEQ ID NO: 379; or a VL of SEQ ID NO: 381 and a VH of SEQ ID NO: 383; or a VL of SEQ ID NO: 385 and a VH of SEQ ID NO: 387; or a VL of SEQ ID NO: 389 and a VH of SEQ ID NO: 391; or a VL of SEQ ID NO: 393 and a VH of SEQ ID NO: 395; or a VL of SEQ ID NO: 397 and a VH of SEQ ID NO: 399; or a VL of SEQ ID NO: 401 and a VH of SEQ ID NO: 403; or a VL of SEQ ID NO: 405 and a VH of SEQ ID NO: 407. In one aspect the invention comprises a nucleic acid encoding an anti-DLL3 antibody of the invention or an immunoreactive fragment thereof. In other embodiments the invention comprises a vector comprising one or more of the above described nucleic acids and/or a host cell comprising said vector.

[0008] In some aspects of the invention the antibody comprises a chimeric, CDR grafted, humanized or human antibody or an immunoreactive fragment thereof. In other aspects of the invention the antibody, preferably comprising all or part of the aforementioned sequences, is an internalizing antibody. In yet other embodiments the antibodies will comprise site-specific antibodies. In other selected embodiments the invention comprises antibody drug conjugates incorporating any of the aforementioned antibodies.

[0009] In certain embodiments the invention comprises an antibody drug conjugate of the formula Ab-[L-D]n or a pharmaceutically acceptable salt thereof wherein: Ab comprises an anti-DLL3 antibody; L comprises an optional linker; D comprises a drug; and n is an integer from 1 to 20. In one aspect the ADC of the invention comprises an anti-DLL3 antibody such as those described above or an immunoreactive fragment thereof. In other embodiments the ADCs of the invention comprise a cytotoxic compound selected from calicheamicins, pyrrolobenzodiazepines, auristatins, duocarmycins, maytansinoids or any one of the compatible therapeutic moieties as described herein. In certain embodiments the invention comprises a pharmaceutical composition comprising an ADC as described above.

[0010] In yet other selected embodiments the ADCs of the instant invention have improved pharmacokinetic and pharmacodynamic properties that provide for an enhanced therapeutic index and allow for optimization of dosing regimens. In this regard the disclosed ADCs will have a terminal half-life exceeding six days, a terminal half-life of greater than seven days or a terminal half-life of greater than eight days when measured as set forth herein. Still other aspects of the invention will comprise ADCs having a terminal half-life of greater than nine days, a terminal half-life of greater than ten days, a terminal half-life of greater than eleven days, a terminal half-life of greater than twelve days (each as measured in human subjects). In still other embodiments the disclosed ADCs will have a terminal half-life of greater than thirteen days, a terminal half-life of greater than about fourteen days, a terminal half-life of greater than fifteen days, a terminal half-life of greater than about sixteen days, a terminal half-life of greater than about seventeen days, a terminal half-life of greater than eighteen days, a terminal half-life of greater than about nineteen days, a terminal half-life of greater than about twenty days or a terminal half-life of greater than three weeks in human subjects. In yet other embodiments the ADCs of the invention will exhibit a terminal half-life of about six days, a terminal half-life of about seven days, a terminal half-life of about eight days, a terminal half-life of about nine days, a terminal half-life of about ten days, a terminal half-life of about eleven days, a terminal half-life of about twelve days, a terminal half-life of about thirteen days, a terminal half-live of about fourteen days, a terminal half-life of about fifteen days, a terminal half-life of about sixteen days, a terminal half-life of about seventeen days, a terminal half-life of about eighteen days, a terminal half-life of about nineteen days, a terminal half-life of about twenty days or a terminal half-live of about three weeks. Those of skill in the art will appreciate that such protracted half-lives will allow for less frequent dosing of the disclosed ADCs thereby providing the desired efficacy while exhibiting similar or reduced toxicity.

[0011] To this end other aspects of the invention are directed to methods of treating cancer comprising administering a pharmaceutical composition such as those described herein to a subject in need thereof. In selected embodiments the methods will comprise administering an ADC having a terminal half-life of greater than about six days, a terminal half-life of greater than about seven days, a terminal half-life of greater than about eight days, a terminal half-life of greater than about nine days, a terminal half-life of greater than about ten days, a terminal half-life of greater than about eleven days, a terminal half-life of greater than about twelve days, a terminal half-life of greater than about thirteen days, a terminal half-live of greater than about fourteen days, a terminal half-life of greater than about fifteen days, a terminal half-life of greater than about sixteen days, a terminal half-life of greater than about seventeen days, a terminal half-life of greater than about eighteen days, a terminal half-life of greater than about nineteen days, a terminal half-life of greater than about twenty days or a terminal half-life of greater than about three weeks.

[0012] In other certain embodiments the cancer will comprise a solid tumor including, but not limited to, adrenal, liver, kidney, bladder, breast, gastric, ovarian, cervical, uterine, esophageal, colorectal, prostate, pancreatic, lung (both small cell and non-small cell), thyroid, carcinomas, sarcomas, glioblastomas and various head and neck tumors. In yet other selected aspects the cancer is selected from the group comprising lung cancer (including small cell lung cancer or large cell neuroendocrine carcinoma), prostate cancer, colorectal cancer and skin cancer such as melanoma (e.g. skin cancer expressing wild type or mutated BRAF). In some embodiments the methods of treating cancer described above comprise administering to the subject at least one additional therapeutic moiety in addition to the disclosed pharmaceutical compositions. In preferred aspects the additional therapeutic moiety will comprise an anti-PD-1 antibody or an anti-PD-L1 antibody.

[0013] As to the aforementioned methods in certain embodiments the present invention provides anti-DLL3 antibody drug conjugates for use in the treatment of cancer wherein the treatment may comprise administering an effective amount of an anti-DLL3 antibody drug conjugate (DLL3 ADC) at least once every week (QW), at least once every two weeks (Q2W), at least once every three weeks (Q3W), at least once every four weeks (Q4W), at least once every five weeks (Q5W), at least once every six weeks (Q6W), at least once every seven weeks (Q7W), at least once every eight weeks (08W), at least once every nine weeks (Q9W), at least once every ten weeks (Q10W), at least once every eleven weeks (Q11W) or at least once every twelve weeks (Q12W). In selected embodiments the DLL3 ADC will be administered at least every three weeks (Q3W), at least once every four weeks (Q4W), at least once every five weeks (Q5W) or at least once every six weeks (Q6W). In other selected embodiments the DLL3 ADC will be administered at a dose of about 0.01 mg/kg, 0.025 mg/kg, 0.05 mg/kg, 0.075 mg/kg, 0.1 mg/kg, 0.15 mg/kg, 0.2 mg/kg, 0.25 mg/kg, 0.3 mg/kg, 0.4 mg/kg, 0.5 mg/kg, 0.6 mg/kg, 0.7 mg/kg, 0.8 mg/kg, 0.9 mg/kg or 1.0 mg/kg. Selected embodiments will comprise treating the patient with a single administration of the DLL3 ADC. Certain other embodiments will comprise treating the patient at specified intervals (i.e. Q2W, 03W, Q4W, Q5W, Q6W, etc) for two cycles (×2), for three cycles (×3), for four cycles (×4), for five cycles (×5), for six cycles (×6), for seven cycles (×7), for eight cycles (×8), for nine cycles (×9), or for ten cycles (×10). In other embodiments the initial DLL3 ADC treatment (of x cycles) may be completed and no further DLL3 ADC treatment is undertaken until the cancer shows signs of progressing (treatment at progression). In yet other embodiments the initial DLL3 ADC treatment (of x cycles) may be completed and then the patient is put on maintenance therapy (e.g., 0.1 mg/kg DLL3 ADC Q6W indefinitely). In such maintenance settings the DLL3 ADC may be administered at relatively low levels as a continuous or periodic (e.g., every hour) infusion via a peristaltic pump. In still other embodiments the patient will receive the initial DLL3 ADC treatment (of x cycles) and then not be treated (with the disclosed ADCs or with another agent) for the same or related cancer again until progression (i.e., treat at progression). In such cases the second treatment cycle (e.g., with DLL3 ADCs) will not be effected until after four, five, six, seven, eight, nine, ten, eleven, twelve, thirteen, fourteen, fifteen or sixteen or more weeks after conclusion of the first treatment cycle.

[0014] In one embodiment the invention comprises a method of reducing tumor initiating cells in a tumor cell population, wherein the method comprises contacting (e.g. in vitro or in vivo) a tumor initiating cell population with an ADCs as described herein whereby the frequency of the tumor initiating cells is reduced.

[0015] In one aspect, the invention comprises a method of delivering a cytotoxin to a cell comprising contacting the cell with any of the above described ADCs.

[0016] In another aspect, the invention comprises a method of detecting, diagnosing, or monitoring cancer (e.g., lung cancer, prostate cancer or melanoma) in a subject, the method comprising the steps of contacting (e.g. in vitro or in vivo) tumor cells with an DLL3 detection agent and detecting the DLL3 detection agent associated with the tumor cells. In selected embodiments the detection agent shall comprise an anti-DLL3 antibody or a nucleic acid probe that associates with a DLL3 genotypic determinant. In related embodiments the diagnostic method will comprise immunohistochemistry (IHC) or in situ hybridization (ISH).

[0017] To this end it will be appreciated that certain aspects of the instant invention comprise the use of DLL3 antibodies for immunohistochemistry. More particularly DLL3 IHC may be used as a diagnostic tool to aid in the diagnosis of various proliferative disorders and to monitor the potential response to treatments including DLL3 antibody therapy. In this respect and as shown in the Examples below immunohistochemistry techniques may be used to derive an H-score as known in the art. Such H-scores (i.e., those 90 and above on a 300 point scale) may be used to indicate which patients may be amenable to treatment with compositions of the instant invention as well as being used to guide treatment decisions and determine dosing regimens and timing. In other embodiments the percentage of positively stained DLL3 cells in the tumor may be used to indicate which patients may be susceptible to treatment with the disclosed DLL3 ADCs.

[0018] In a similar vein the present invention also provides kits or devices and associated methods that are useful in the diagnosis, monitoring or treatment of DLL3 associated disorders such as cancer. To this end the present invention preferably provides an article of manufacture useful for detecting, diagnosing or treating DLL3 associated disorders comprising a receptacle containing a DLL3 ADC and instructional materials for using said DLL3 ADC to treat, monitor or diagnose the DLL3 associated disorder. In selected embodiments the devices and associated methods will comprise the step of contacting at least one circulating tumor cell. In other embodiments the disclosed kits will comprise instructions, labels, inserts, readers or the like indicating that the kit or device is used for the diagnosis, monitoring or treatment of a DLL3 associated cancer.

[0019] The foregoing is a summary and thus contains, by necessity, simplifications, generalizations, and omissions of detail; consequently, those skilled in the art will appreciate that the summary is illustrative only and is not intended to be in any way limiting. Other aspects, features, and advantages of the methods, compositions and/or devices and/or other subject matter described herein will become apparent in the teachings set forth herein. The summary is provided to introduce a selection of concepts in a simplified form that are further described below in the Detailed Description.

### BRIEF DESCRIPTION OF THE FIGURES

[0020] FIGS. 1A and 1B provide, in a tabular form, contiguous amino acid sequences (SEQ ID NOS: 21-407, odd numbers) of light and heavy chain variable regions of a number of murine and humanized exemplary DLL3 antibodies compatible with the disclosed DLL3 ADCs isolated, cloned and engineered as described in the Examples herein;

[0021] FIG. 2 depicts, in schematic form, the results of domain level mapping analysis of exemplary DLL3 antibodies isolated, cloned and engineered as described in the Examples herein;

[0022] FIGS. 3A and 3B provide immunohistochemistry data showing that DLL3 expression does not correlate with clinical outcome of standard of care therapies (FIG. 3A) and that DLL3 expression is elevated in both naïve and chemorefractory SCLC patients (FIG. 3B);

[0023] FIGS. 4A-4F provide various data regarding a Phase I study where FIG. 4A summarizes the study design and results, FIG. 4B depicts clinical pharmacokinetics of the DLL3 ADCs, FIG. 4C shows durations of response provided by the DLL3 ADCs, FIGS. 4D and 4E show responses of all treated patients and DLL3+ positive patients and FIG. 4F provides a tabular summary of reported adverse events;

[0024] FIGS. 5A-5C provide data in a tabular form demonstrating that lyophilized embodiments of the disclosed DLL3 ADCs are stable at three different temperatures; and

[0025] FIGS. 6A and 6B illustrate that, when administered in combination, DLL3 ADCs and anti-PD-1 antibodies act to inhibit tumor growth in immunocompetent mice.

### DETAILED DESCRIPTION OF THE INVENTION

[0026] The invention may be embodied in many different forms. Disclosed herein are non-limiting, illustrative embodiments of the invention that exemplify the principles thereof. Any section headings used herein are for organizational purposes only and are not to be construed as limiting the subject matter described. For the purposes of the instant disclosure all identifying sequence accession numbers may be found in the NCBI Reference Sequence (RefSeq) database and/or the NCBI GenBank® archival sequence database unless otherwise noted.

[0027] DLL3 expression has surprisingly been found to correlate with a number of tumor types and, as a determinant, may be exploited in the treatment of such tumors. It has also unexpectedly been found that DLL3 expression is associated with tumorigenic cells and, as such, may be effectively exploited to inhibit or eliminate such cells. Tumorigenic cells, which will be described in more detail below, are known to exhibit resistance to many conventional treatments. In contrast to the teachings of the prior art, the disclosed compounds and methods effectively overcome this inherent resistance.

[0028] The invention provides anti-DLL3 antibodies (including antibody drug conjugates) and their use in the prognosis, diagnosis, theragnosis, treatment and/or prevention of a variety of DLL3-associated cancers regardless of any particular mechanism of action or specifically targeted cellular or molecular component. Surprisingly, certain disclosed DLL3 ADCs have been found to have a relatively long half-life in vivo allowing for novel dosing regimens that provide an unexpectedly robust therapeutic index. Moreover, patients suffering from tumors expressing certain levels of DLL3 are particularly receptive to treatment with the instant antibodies and ADCs as evidenced by clinical trial data appended hereto. Yet other embodiments comprise the use of the disclosed DLL3 ADCs in combination with certain immunotherapeutic compounds, including antibodies to PD-1 that appear surprisingly effective in inhibiting tumor growth. In still other embodiments the disclosed ADCs have been found to exhibit unusual stability in a lyophilized form. It will be appreciated that such advances generally provides for more effective administration of the disclosed compositions and, ultimately, better patient outcomes than provided by standard of care therapies.

### I. DLL3 PHYSIOLOGY

[0029] It has been found that DLL3 phenotypic determinants are clinically associated with various proliferative disorders, including neoplasia exhibiting neuroendocrine features, and that DLL3 protein and variants or isoforms thereof provide useful tumor markers which may be exploited in the treatment of related diseases. In this regard the present invention provides a number of antibody drug conjugates comprising an anti-DLL3 antibody targeting agent and a payload (e.g., a payload comprising a PBD warhead). As discussed in more detail below and set forth in the appended Examples, the disclosed anti-DLL3 ADCs are particularly effective at eliminating tumorigenic cells and therefore useful for the treatment and prophylaxis of certain proliferative disorders or the progression or recurrence thereof. In addition, certain disclosed ADC compositions (e.g., site-specific constructs) may exhibit a relatively high DAR=2 percentage and unexpected stability that may provide for an improved therapeutic index when compared with conventional ADC compositions comprising the same components. Additionally, the disclosed ADCs may exhibit protracted terminal half-lives allowing for the use of novel dosing regimens that may further increase the therapeutic index.

[0030] Moreover, it has been found that DLL3 markers or determinants such as cell surface DLL3 protein are therapeutically associated with cancer stem cells (also known as tumor perpetuating cells) and may be effectively exploited to eliminate or silence the same. The ability to selectively reduce or eliminate cancer stem cells through the use of anti-DLL3 conjugates as disclosed herein is surprising in that such cells are known to generally be resistant to many conventional treatments. That is, the effectiveness of traditional, as well as more recent targeted treatment methods, is often limited by the existence and/or emergence of resistant cancer stem cells that are capable of perpetuating tumor growth even in face of these diverse treatment methods. Further, determinants associated with cancer stem cells often make poor therapeutic targets due to low or inconsistent expression, failure to remain associated with the tumorigenic cell or failure to present at the cell surface. In sharp contrast to the teachings of the prior art, the instantly disclosed ADCs and methods effectively overcome this inherent resistance and to specifically eliminate, deplete, silence or promote the differentiation of such cancer stem cells thereby negating their ability to sustain or re-induce the underlying tumor growth. Moreover, as indicated herein the unexpected stability provided by the disclosed ADCs and relatively homogeneous DAR preparations allow for novel dosing regimens that may be particularly efficacious.

[0031] Thus DLL3 conjugates such as those disclosed herein may advantageously be used in the treatment and/or prevention of selected proliferative (e.g., neoplastic) disorders or progression or recurrence thereof. It will be appreciated that, while preferred embodiments of the invention will be discussed extensively below, particularly in terms of particular domains, regions or epitopes or in the context of cancer stem cells or tumors comprising neuroendocrine features and their interactions with the disclosed antibody drug conjugates, those skilled in the art will appreciate that the scope of the instant invention is not limited by such exemplary embodiments. Rather, the most expansive embodiments of the present invention and the appended claims are broadly and expressly directed to the disclosed anti-DLL3 conjugates and their use in the treatment and/or prevention of a variety of DLL3 associated or mediated disorders, including neoplastic or cell proliferative disorders, regardless of any particular mechanism of action or specifically targeted tumor, cellular or molecular component.

[0032] In Drosophila, Notch signaling is mediated primarily by one Notch receptor gene and two ligand genes, known as Serrate and Delta (Wharton et al, 1985; Rebay et al., 1991). In humans, there are four known Notch receptors and five DSL (Delta-Serrate LAG2) ligands—two homologs of Serrate, known as Jagged1 and Jagged 2, and three homologs of Delta, termed delta-like ligands or DLL1, DLL3 and DLL4. In general, Notch receptors on the surface of the signal-receiving cell are activated by interactions with ligands expressed on the surface of an opposing, signal-sending cell (termed a trans-interaction). These trans-interactions lead to a sequence of protease mediated cleavages of the Notch receptor. In consequence, the Notch receptor intracellular domain is free to translocate from the membrane to the nucleus, where it partners with the CSL family of transcription factors (RBPJ in humans) and converts them from transcriptional repressors into activators of Notch responsive genes.

[0033] Of the human Notch ligands, DLL3 is different in that it seems incapable of activating the Notch receptor via trans-interactions (Ladi et al., 2005). Notch ligands may also interact with Notch receptors in cis (on the same cell) leading to inhibition of the Notch signal, although the exact mechanisms of cis-inhibition remain unclear and may vary depending upon the ligand (for instance, see Klein et al., 1997; Ladi et al., 2005; Glittenberg et al., 2006). Two hypothesized modes of inhibition include modulating Notch signaling at the cell surface by preventing trans-interactions, or by reducing the amount of Notch receptor on the surface of the cell by perturbing the processing of the receptor or by physically causing retention of the receptor in the endoplasmic reticulum or Golgi (Sakamoto et al., 2002; Dunwoodie, 2009). It is clear, however, that stochastic differences in expression of Notch receptors and ligands on neighboring cells can be amplified through both transcriptional and non-transcriptional processes, and subtle balances of cis- and trans-interactions can result in a fine tuning of the Notch mediated delineation of divergent cell fates in neighboring tissues (Sprinzak et al., 2010).

[0034] DLL3 is a member of the Delta-like family of Notch DSL ligands. Representative DLL3 protein orthologs include, but are not limited to, human (Accession Nos. NP_058637 and NP_982353), chimpanzee (Accession No. XP_003316395), mouse (Accession No. NP_031892), and rat (Accession No. NP_446118). In humans, the DLL3 gene consists of 8 exons spanning 9.5 kBp located on chromosome 19q13. Alternate splicing within the last exon gives rise to two processed transcripts, one of 2389 bases (Accession No. NM_016941) and one of 2052 bases (Accession No. NM_203486). The former transcript encodes a 618 amino acid protein (Accession No. NP_058637; SEQ ID NO: 1), whereas the latter encodes a 587 amino acid protein (Accession No. NP_982353; SEQ ID NO: 2). These two protein isoforms of DLL3 share overall 100% identity across their extracellular domains and their transmembrane domains, differing only in that the longer isoform contains an extended cytoplasmic tail containing 32 additional residues at the carboxy terminus of the protein. The biological relevance of the isoforms is unclear, although both isoforms can be detected in tumor cells.

[0035] The extracellular region of the DLL3 protein comprises six EGF-like domains, the single DSL domain and the N-terminal domain. Generally, the EGF domains are recognized as occurring at about amino acid residues 216-249 (domain 1), 274-310 (domain 2), 312-351 (domain 3), 353-389 (domain 4), 391-427 (domain 5) and 429-465 (domain 6), with the DSL domain at about amino acid residues 176-215 and the N-terminal domain at about amino acid residues 27-175 of hDLL3 (SEQ ID NOS: 1 and 2). As discussed in more detail herein and shown in the Examples below, each of the EGF-like domains, the DSL domain and the N-terminal domain comprise part of the DLL3 protein as defined by a distinct amino acid sequence. Note that, for the purposes of the instant disclosure the respective EGF-like domains may be termed EGF1 to EGF6 with EGF1 being closest to the N-terminal portion of the protein. In regard to the structural composition of the protein one significant aspect of the instant invention is that the disclosed DLL3 modulators may be generated, fabricated, engineered or selected so as to react with a selected domain, motif or epitope. In certain cases such antibodies or ADCs may provide enhanced reactivity and/or efficacy depending on their primary mode of action. In particularly preferred embodiments the anti-DLL3 ADCs will bind to the DSL domain and, in even more preferred embodiments, will bind to an epitope comprising G203, R205, P206 (SEQ ID NO: 4) within the DSL domain.

### II. CANCER STEM CELLS

[0036] According to the current models, a tumor comprises non-tumorigenic cells and tumorigenic cells. Non-tumorigenic cells do not have the capacity to self-renew and are incapable of reproducibly forming tumors, even when transplanted into immunocompromised mice in excess cell numbers. Tumorigenic cells, also referred to herein as “tumor initiating cells” (TICs), which make up 0.1-40% (more typically 0.1-10% or 0.01-1.0%) of a tumor's cell population, have the ability to form tumors. Tumorigenic cells encompass both tumor perpetuating cells (TPCs), referred to interchangeably as cancer stem cells (CSCs) and tumor progenitor cells (TProgs).

[0037] CSCs, like normal stem cells that support cellular hierarchies in normal tissue, are able to self-replicate indefinitely while maintaining the capacity for multilineage differentiation. In this regard CSCs are able to generate both tumorigenic progeny and non-tumorigenic progeny and are able to completely recapitulate the heterogeneous cellular composition of the parental tumor as demonstrated by serial isolation and transplantation of low numbers of isolated CSCs into immunocompromised mice. Evidence indicates that unless these “seed cells” are eliminated tumors are much more likely to metastasize or reoccur leading to relapse and ultimate progression of the disease.

[0038] TProgs, like CSCs have the ability to fuel tumor growth in a primary transplant. However, unlike CSCs, they are not able to recapitulate the cellular heterogeneity of the parental tumor and are less efficient at reinitiating tumorigenesis in subsequent transplants because TProgs are typically only capable of a finite number of cell divisions as demonstrated by serial transplantation of low numbers of highly purified TProg into immunocompromised mice. TProgs may further be divided into early TProgs and late TProgs, which may be distinguished by phenotype (e.g., cell surface markers) and their different capacities to recapitulate tumor cell architecture. While neither can recapitulate a tumor to the same extent as CSCs, early TProgs have a greater capacity to recapitulate the parental tumor's characteristics than late TProgs. Notwithstanding the foregoing distinctions, it has been shown that some TProg populations can, on rare occasion, gain self-renewal capabilities normally attributed to CSCs and can themselves become CSCs.

[0039] CSCs exhibit higher tumorigenicity and are relatively more quiescent than: (i) TProgs (both early and late TProgs); and (ii) non-tumorigenic cells such as tumor-infiltrating cells, for example, fibroblasts/stroma, endothelial and hematopoietic cells that may be derived from CSCs and typically comprise the bulk of a tumor. Given that conventional therapies and regimens have, in large part, been designed to debulk tumors and attack rapidly proliferating cells, CSCs are more resistant to conventional therapies and regimens than the faster proliferating TProgs and other bulk tumor cell populations such as non-tumorigenic cells. Other characteristics that may make CSCs relatively chemoresistant to conventional therapies are increased expression of multi-drug resistance transporters, enhanced DNA repair mechanisms and anti-apoptotic gene expression. Such CSC properties have been implicated in the failure of standard treatment regimens to provide a lasting response in patients with advanced stage neoplasia as standard chemotherapy does not effectively target the CSCs that actually fuel continued tumor growth and recurrence. By inhibiting or eliminating the ability of these seed cells to propagate tumor growth and spread the disclosed compounds and compositions

[0040] It has surprisingly been discovered that DLL3 expression is associated with various tumorigenic cell subpopulations in a manner which renders them susceptible to treatment as set forth herein. The invention provides anti-DLL3 antibodies that may be particularly useful for targeting tumorigenic cells and may be used to silence, sensitize, neutralize, reduce the frequency, block, abrogate, interfere with, decrease, hinder, restrain, control, deplete, moderate, mediate, diminish, reprogram, eliminate, kill or otherwise inhibit (collectively, “inhibit”) tumorigenic cells, thereby facilitating the treatment, management and/or prevention of proliferative disorders (e.g. cancer). Advantageously, the novel anti-DLL3 antibodies of the invention may be selected so they preferably reduce the frequency or tumorigenicity of tumorigenic cells upon administration to a subject regardless of the form of the DLL3 determinant (e.g., phenotypic or genotypic). The reduction in tumorigenic cell frequency may occur as a result of (i) inhibition or eradication of tumorigenic cells; (ii) controlling the growth, expansion or recurrence of tumorigenic cells; (iii) interrupting the initiation, propagation, maintenance, or proliferation of tumorigenic cells; or (iv) by otherwise hindering the survival, regeneration and/or metastasis of the tumorigenic cells. In some embodiments, the inhibition of tumorigenic cells may occur as a result of a change in one or more physiological pathways. The change in the pathway, whether by inhibition of the tumorigenic cells, modification of their potential (for example, by induced differentiation or niche disruption) or otherwise interfering with the ability of tumorigenic cells to influence the tumor environment or other cells, allows for the more effective treatment of DLL3 associated disorders by inhibiting tumorigenesis, tumor maintenance and/or metastasis and recurrence. It will further be appreciated that the same characteristics of the disclosed antibodies make them particularly effective at treating recurrent tumors which have proved resistant or refractory to standard treatment regimens.

[0041] Methods that can be used to assess the reduction in the frequency of tumorigenic cells, include but are not limited to, cytometric or immunohistochemical analysis, preferably by in vitro or in vivo limiting dilution analysis (Dylla et al. 2008, PMID: PMC2413402 and Hoey et al. 2009, PMID: 19664991).

[0042] In vitro limiting dilution analysis may be performed by culturing fractionated or unfractionated tumor cells (e.g. from treated and untreated tumors, respectively) on solid medium that fosters colony formation and counting and characterizing the colonies that grow. Alternatively, the tumor cells can be serially diluted onto plates with wells containing liquid medium and each well can be scored as either positive or negative for colony formation at any time after inoculation but preferably more than 10 days after inoculation.

[0043] In vivo limiting dilution is performed by transplanting tumor cells, from either untreated controls or from tumors exposed to selected therapeutic agents, into immunocompromised mice in serial dilutions and subsequently scoring each mouse as either positive or negative for tumor formation. The scoring may occur at any time after the implanted tumors are detectable but is preferably done 60 or more days after the transplant. The analysis of the results of limiting dilution experiments to determine the frequency of tumorigenic cells is preferably done using Poisson distribution statistics or assessing the frequency of predefined definitive events such as the ability to generate tumors in vivo or not (Fazekas et al., 1982, PMID: 7040548).

[0044] Flow cytometry and immunohistochemistry may also be used to determine tumorigenic cell frequency. Both techniques employ one or more antibodies or reagents that bind art recognized cell surface proteins or markers known to enrich for tumorigenic cells (see WO 2012/031280). As known in the art, flow cytometry (e.g. florescence activated cell sorting (FACS)) can also be used to characterize, isolate, purify, enrich or sort for various cell populations including tumorigenic cells. Flow cytometry measures tumorigenic cell levels by passing a stream of fluid, in which a mixed population of cells is suspended, through an electronic detection apparatus which is able to measure the physical and/or chemical characteristics of up to thousands of particles per second. Immunohistochemistry provides additional information in that it enables visualization of tumorigenic cells in situ (e.g., in a tissue section) by staining the tissue sample with labeled antibodies or reagents which bind to tumorigenic cell markers.

[0045] As such, the antibodies of the invention may be useful for identifying, characterizing, monitoring, isolating, sectioning or enriching populations or subpopulations of tumorigenic cells through methods such as, for example, flow cytometry, magnetic activated cell sorting (MACS), laser mediated sectioning or FACS. FACS is a reliable method used to isolate cell subpopulations at more than 99.5% purity based on specific cell surface markers. Other compatible techniques for the characterization and manipulation of tumorigenic cells including CSCs can be seen, for example, in U.S. Ser. Nos. 12/686,359, 12/669,136 and 12/757,649.

[0046] Listed below are markers that have been associated with CSC populations and have been used to isolate or characterize CSCs: ABCA1, ABCA3, ABCG2, ADAMS, ADCY9, ADORA2A, AFP, AXIN1, B7H3, BCL9, Bmi-1, BMP-4, C20orf52, C4.4A, carboxypeptidase M, CAV1, CAV2, CD105, CD133, CD14, CD16, CD166, CD16a, CD16b, CD2, CD20, CD24, CD29, CD3, CD31, CD324, CD325, CD34, CD38, CD44, CD45, CD46, CD49b, CD49f, CD56, CD64, CD74, CD9, CD90, CEACAM6, CELSR1, CPD, CRIM1, CX3CL1, CXCR4, DAF, decorin, easyh1, easyh2, EDG3, eed, EGFR, ENPP1, EPCAM, EPHA1, EPHA2, FLJ10052, FLVCR, FZD1, FZD10, FZD2, FZD3, FZD4, FZD6, FZD7, FZD8, FZD9, GD2, GJA1, GLI1, GLI2, GPNMB, GPR54, GPRC5B, IL1R1, ID1RAP, JAM3, Lgr5, Lgr6, LRP3, LY6E, MCP, mf2, mllt3, MPZL1, MUC1, MUC16, MYC, N33, Nanog, NB84, nestin, NID2, NMA, NPC1, oncostatin M, OCT4, OPN3, PCDH7, PCDHA10, PCDHB2, PPAP2C, PTPN3, PATIENTS, RARRES1, SEMA4B, SLC19A2, SLC1A1, SLC39A1, SLC4A11, SLC6A14, SLC7A8, smarcA3, smarcD3, smarcE1, smarcA5, Sox1, STAT3, STEAP, TCF4, TEM8, TGFBR3, TMEPAI, TMPRSS4, transferrin receptor, TrkA, WNT10B, WNT16, WNT2, WNT2B, WNT3, WNT5A, YY1 and β-catenin. See, for example, Schulenburg et al., 2010, PMID: 20185329, U.S. Pat. No. 7,632,678 and U.S.P.N.s. 2007/0292414, 2008/0175870, 2010/0275280, 2010/0162416 and 2011/0020221.

[0047] Similarly, non-limiting examples of cell surface phenotypes associated with CSCs of certain tumor types include CD44^{hi}CD24^{low}, ALDH⁺, CD133⁺, CD123⁺, CD34⁺CD38⁻, CD44⁺CD24⁻, CD46^{hi}CD324⁺CD66c⁻, CD133⁺CD34⁺CD10⁻CD19⁻, CD138⁻CD34⁻CD19⁺, CD133⁺RC2⁺, CD44⁺α₂β₁^{hi}CD133⁺, CD44⁺CD24⁺ESA⁺, CD271⁺, ABCB5⁺ as well as other CSC surface phenotypes that are known in the art. See, for example, Schulenburg et al., 2010, supra, Visvader et al., 2008, PMID: 18784658 and U.S.P.N. 2008/0138313. Of particular interest with respect to the instant invention are CSC preparations comprising CD46^{hi}CD324⁺ phenotypes.

[0048] “Positive,” “low” and “negative” expression levels as they apply to markers or marker phenotypes are defined as follows. Cells with negative expression (i.e. “−”) are herein defined as those cells expressing less than, or equal to, the 95th percentile of expression observed with an isotype control antibody in the channel of fluorescence in the presence of the complete antibody staining cocktail labeling for other proteins of interest in additional channels of fluorescence emission. Those skilled in the art will appreciate that this procedure for defining negative events is referred to as “fluorescence minus one”, or “FMO”, staining. Cells with expression greater than the 95th percentile of expression observed with an isotype control antibody using the FMO staining procedure described above are herein defined as “positive” (i.e. “+”). As defined herein there are various populations of cells broadly defined as “positive.” A cell is defined as positive if the mean observed expression of the antigen is above the 95th percentile determined using FMO staining with an isotype control antibody as described above. The positive cells may be termed cells with low expression (i.e. “lo”) if the mean observed expression is above the 95^{th} percentile determined by FMO staining and is within one standard deviation of the 95^{th} percentile. Alternatively, the positive cells may be termed cells with high expression (i.e. “hi”) if the mean observed expression is above the 95^{th} percentile determined by FMO staining and greater than one standard deviation above the 95^{th} percentile. In other embodiments the 99th percentile may preferably be used as a demarcation point between negative and positive FMO staining and in some embodiments the percentile may be greater than 99%.

[0049] The CD46^{hi}CD324⁺ marker phenotype and those exemplified immediately above may be used in conjunction with standard flow cytometric analysis and cell sorting techniques to characterize, isolate, purify or enrich TIC and/or TPC cells or cell populations for further analysis.

[0050] The ability of the antibodies of the current invention to reduce the frequency of tumorigenic cells can therefore be determined using the techniques and markers described above. In some instances, the anti-DLL3 antibodies may reduce the frequency of tumorigenic cells by 10%, 15%, 20%, 25%, 30% or even by 35%. In other embodiments, the reduction in frequency of tumorigenic cells may be in the order of 40%, 45%, 50%, 55%, 60% or 65%. In certain embodiments, the disclosed compounds my reduce the frequency of tumorigenic cells by 70%, 75%, 80%, 85%, 90% or even 95%. It will be appreciated that any reduction of the frequency of tumorigenic cells is likely to result in a corresponding reduction in the tumorigenicity, persistence, recurrence and aggressiveness of the neoplasia.

### III. ANTIBODIES

[0051] A. Antibody Structure

[0052] Antibodies and variants and derivatives thereof, including accepted nomenclature and numbering systems, have been extensively described, for example, in Abbas et al. (2010), Cellular and Molecular Immunology (6^{th} Ed.), W.B. Saunders Company; or Murphey et al. (2011), Janeway's Immunobiology (8^{th} Ed.), Garland Science.

[0053] An “antibody” or “intact antibody” typically refers to a Y-shaped tetrameric protein comprising two heavy (H) and two light (L) polypeptide chains held together by covalent disulfide bonds and non-covalent interactions. Each light chain is composed of one variable domain (VL) and one constant domain (CL). Each heavy chain comprises one variable domain (VH) and a constant region, which in the case of IgG, IgA, and IgD antibodies, comprises three domains termed CH1, CH2, and CH3 (IgM and IgE have a fourth domain, CH4). In IgG, IgA, and IgD classes the CH1 and CH2 domains are separated by a flexible hinge region, which is a proline and cysteine rich segment of variable length (from about 10 to about 60 amino acids in various IgG subclasses). The variable domains in both the light and heavy chains are joined to the constant domains by a “J” region of about 12 or more amino acids and the heavy chain also has a “D” region of about 10 additional amino acids. Each class of antibody further comprises inter-chain and intra-chain disulfide bonds formed by paired cysteine residues.

[0054] As used herein the term “antibody” includes polyclonal antibodies, multiclonal antibodies, monoclonal antibodies, chimeric antibodies, humanized and primatized antibodies, CDR grafted antibodies, human antibodies (including recombinantly produced human antibodies), recombinantly produced antibodies, intrabodies, multispecific antibodies, bispecific antibodies, monovalent antibodies, multivalent antibodies, anti-idiotypic antibodies, synthetic antibodies, including muteins and variants thereof, immunospecific antibody fragments such as Fd, Fab, F(ab′)₂, F(ab′) fragments, single-chain fragments (e.g. ScFv and ScFvFc); and derivatives thereof including Fc fusions and other modifications, and any other immunoreactive molecule so long as it exhibits preferential association or binding with a determinant. Moreover, unless dictated otherwise by contextual constraints the term further comprises all classes of antibodies (i.e. IgA, IgD, IgE, IgG, and IgM) and all subclasses (i.e., IgG1, IgG2, IgG3, IgG4, IgA1, and IgA2). Heavy-chain constant domains that correspond to the different classes of antibodies are typically denoted by the corresponding lower case Greek letter α, δ, ε, γ, and μ, respectively. Light chains of the antibodies from any vertebrate species can be assigned to one of two clearly distinct types, called kappa (κ) and lambda (λ), based on the amino acid sequences of their constant domains.

[0055] The variable domains of antibodies show considerable variation in amino acid composition from one antibody to another and are primarily responsible for antigen recognition and binding. Variable regions of each light/heavy chain pair form the antibody binding site such that an intact IgG antibody has two binding sites (i.e. it is bivalent). VH and VL domains comprise three regions of extreme variability, which are termed hypervariable regions, or more commonly, complementarity-determining regions (CDRs), framed and separated by four less variable regions known as framework regions (FRs). The non-covalent association between the VH and the VL region forms the Fv fragment (for “fragment variable”) which contains one of the two antigen-binding sites of the antibody. ScFv fragments (for single chain fragment variable), which can be obtained by genetic engineering, associates in a single polypeptide chain, the VH and the VL region of an antibody, separated by a peptide linker.

[0056] As used herein, the assignment of amino acids to each domain, framework region and CDR may be in accordance with one of the schemes provided by Kabat et al. (1991) Sequences of Proteins of Immunological Interest (5^{th} Ed.), US Dept. of Health and Human Services, PHS, NIH, NIH Publication no. 91-3242; Chothia et al., 1987, PMID: 3681981; Chothia et al., 1989, PMID: 2687698; MacCallum et al., 1996, PMID: 8876650; or Dubel, Ed. (2007) Handbook of Therapeutic Antibodies, 3^{rd} Ed., Wily-VCH Verlag GmbH and Co or AbM (Oxford Molecular/MSI Pharmacopia) unless otherwise noted. As is well known in the art variable region residue numbering is typically as set forth in Chothia or Kabat. Amino acid residues which comprise CDRs as defined by Kabat, Chothia, MacCallum (also known as Contact) and AbM as obtained from the Abysis website database (infra.) are set out below in Table 1. Note that MacCallum uses the Chothia numbering system.

TABLE 1

| | Kabat | Chothia | MacCallum | AbM |
|---|---|---|---|---|
| VH CDR1 | 31-35 | 26-32 | 30-35 | 26-35 |
| VH CDR2 | 50-65 | 52-56 | 47-58 | 50-58 |
| VH CDR3 | 95-102 | 95-102 | 93-101 | 95-102 |
| VL CDR1 | 24-34 | 24-34 | 30-36 | 24-34 |
| VL CDR2 | 50-56 | 50-56 | 46-55 | 50-56 |
| VL CDR3 | 89-97 | 89-97 | 89-96 | 89-97 |

[0057] Variable regions and CDRs in an antibody sequence can be identified according to general rules that have been developed in the art (as set out above, such as, for example, the Kabat nomenclature system) or by aligning the sequences against a database of known variable regions. Methods for identifying these regions are described in Kontermann and Dubel, eds., Antibody Engineering, Springer, New York, N.Y., 2001 and Dinarello et al., Current Protocols in Immunology, John Wiley and Sons Inc., Hoboken, N.J., 2000. Exemplary databases of antibody sequences are described in, and can be accessed through, the “Abysis” website at www.bioinf.org.uk/abs (maintained by A. C. Martin in the Department of Biochemistry & Molecular Biology University College London, London, England) and the VBASE2 website at www.vbase2.org, as described in Retter et al., Nucl. Acids Res., 33 (Database issue): D671-D674 (2005). Preferably the sequences are analyzed using the Abysis database, which integrates sequence data from Kabat, IMGT and the Protein Data Bank (PDB) with structural data from the PDB. See Dr. Andrew C. R. Martin's book chapter Protein Sequence and Structure Analysis of Antibody Variable Domains. In: Antibody Engineering Lab Manual (Ed.: Duebel, S. and Kontermann, R., Springer-Verlag, Heidelberg, ISBN-13: 978-3540413547, also available on the website bioinforg.uk/abs). The Abysis database website further includes general rules that have been developed for identifying CDRs which can be used in accordance with the teachings herein. Unless otherwise indicated, all CDRs set forth herein are derived according to the Abysis database website as per Kabat et al.

[0058] For heavy chain constant region amino acid positions discussed in the invention, numbering is according to the Eu index first described in Edelman et al., 1969, Proc. Natl. Acad. Sci. USA 63(1): 78-85 describing the amino acid sequence of the myeloma protein Eu, which reportedly was the first human IgG1 sequenced. The Eu index of Edelman is also set forth in Kabat et al., 1991 (supra.). Thus, the terms “Eu index as set forth in Kabat” or “Eu index of Kabat” or “Eu index” or “Eu numbering” in the context of the heavy chain refers to the residue numbering system based on the human IgG1 Eu antibody of Edelman et al. as set forth in Kabat et al., 1991 (supra.). The numbering system used for the light chain constant region amino acid sequence is similarly set forth in Kabat et al., (supra.). An exemplary kappa light chain constant region amino acid sequence compatible with the present invention is set forth immediately below:

(SEQ ID NO: 5)
[sequence omitted]

[0059] Similarly, an exemplary IgG1 heavy chain constant region amino acid sequence compatible with the present invention is set forth immediately below:

(SEQ ID NO: 6)
ASTKGPSVFPLAPSSKSTSGGTAALGCLVKDYFPEPVTVSWNSGALTS
GVHTFPAVLQSSGLYSLSSVVTVPSSSLGTQTYICNVNHKPSNTKVDK
KVEPKSCDKTHTCPPCPAPELLGGPSVFLFPPKPKDTLMISRTPEVTC
VVVDVSHEDPEVKFNWYVDGVEVHNAKTKPREEQYNSTYRVVSVLTVL
HQDWLNGKEYKCKVSNKALPAPIEKTISKAKGQPREPQVYTLPPSRDE
LTKNQVSLTCLVKGFYPSDIAVEWESNGQPENNYKTTPPVLDSDGSFF
LYSKLTVDKSRWQQGNVFSCSVMHEALHNHYTQKSLSLSPG.

[0060] The disclosed constant region sequences, or art-known variations or derivatives thereof, may be operably associated with the disclosed heavy and light chain variable regions using standard molecular biology techniques to provide full-length antibodies that may be used as such or incorporated in the anti-DLL3 ADCs of the invention. In this regard, and for the purposes of illustration, the full length heavy (SEQ ID NO: 7) and light (SEQ ID NO: 8) chain amino acid sequences for the exemplary antibody hSC16.56 are set forth immediately below.

(SEQ ID NO: 7)
QVQLVQSGAEVKKPGASVKVSCKASGYTFTNYGMNWVRQAPGQGLEWM
GWINTYTGEPTYADDFKGRVTMTTDTSTSTAYMELRSLRSDDTAVYYC
ARIGDSSPSDYWGQGTLVTVSSASTKGPSVFPLAPSSKSTSGGTAALG
CLVKDYFPEPVTVSWNSGALTSGVHTFPAVLQSSGLYSLSSVVTVPSS
SLGTQTYICNVNHKPSNTKVDKKVEPKSCDKTHTCPPCPAPELLGGPS
VFLFPPKPKDTLMISRTPEVTCVVVDVSHEDPEVKFNWYVDGVEVHNA
KTKPREEQYNSTYRVVSVLTVLHQDWLNGKEYKCKVSNKALPAPIEKT
ISKAKGQPREPQVYTLPPSRDELTKNQVSLTCLVKGFYPSDIAVEWES
NGQPENNYKTIPPVLDSDGSFFLYSKLTVDKSRWQQGNVFSCSVMHEA
LHNHYTQKSLSLSPG.
(SEQ ID NO: 8)
EIVMTQSPATLSVSPGERATLSCKASQSVSNDVVWYQQKPGQAPRLLI
YYASNRYTGIPARFSGSGSGTEFTLTISSLQSEDFAVYYCQQDYTSPW
TFGQGTKLEIKRTVAAPSVFIFPPSDEQLKSGTASVVCLLNNFYPREA
KVQWKVDNALQSGNSQESVTEQDSKDSTYSLSSTLTLSKADYEKHKVY
ACEVTHQGLSSPVTKSFNRGEC.

[0061] It will be appreciated that the antibodies or immunoglobulins (and ADCs) of the invention may be generated from an antibody that specifically recognizes or associates with any DLL3 determinant. As used herein “determinant” or “target” means any detectable trait, property, marker or factor that is identifiably associated with, or specifically found in or on a particular cell, cell population or tissue. Determinants or targets may be morphological, functional or biochemical in nature and are preferably phenotypic. In some embodiments a determinant is a protein that is differentially expressed (over- or under-expressed) by specific cell types or by cells under certain conditions (e.g., during specific points of the cell cycle or cells in a particular niche). For the purposes of the instant invention a determinant preferably is differentially expressed on aberrant cancer cells and may comprise a DLL3 protein, or any of its splice variants, isoforms, homologs or family members, or specific domains, regions or epitopes thereof. An “antigen”, “immunogenic determinant”, “antigenic determinant” or “immunogen” means any protein or any fragment, region or domain thereof that can stimulate an immune response when introduced into an immunocompetent animal and is recognized by the antibodies produced from the immune response. The presence or absence of the DLL3 determinants contemplated herein may be used to identify a cell, cell subpopulation or tissue (e.g., tumors, tumorigenic cells or CSCs).

[0062] There are two types of disulfide bridges or bonds in immunoglobulin molecules: interchain and intrachain disulfide bonds. As is well known in the art the location and number of interchain disulfide bonds vary according to the immunoglobulin class and species. While the invention is not limited to any particular class or subclass of antibody, the IgG1 immunoglobulin shall be used throughout the instant disclosure for illustrative purposes. In wild-type IgG1 molecules there are twelve intrachain disulfide bonds (four on each heavy chain and two on each light chain) and four interchain disulfide bonds. Intrachain disulfide bonds are generally somewhat protected and relatively less susceptible to reduction than interchain bonds. Conversely, interchain disulfide bonds are located on the surface of the immunoglobulin, are accessible to solvent and are usually relatively easy to reduce. Two interchain disulfide bonds exist between the heavy chains and one from each heavy chain to its respective light chain. It has been demonstrated that interchain disulfide bonds are not essential for chain association. The IgG1 hinge region contain the cysteines in the heavy chain that form the interchain disulfide bonds, which provide structural support along with the flexibility that facilitates Fab movement. The heavy/heavy IgG1 interchain disulfide bonds are located at residues C226 and C229 (Eu numbering) while the IgG1 interchain disulfide bond between the light and heavy chain of IgG1 (heavy/light) are formed between C214 of the kappa or lambda light chain and C220 in the upper hinge region of the heavy chain.

[0063] B. Antibody Generation and Production

[0064] Antibodies of the invention can be produced using a variety of methods known in the art.

[0065] 1. Generation of Polyclonal Antibodies in Host Animals

[0066] The production of polyclonal antibodies in various host animals is well known in the art (see for example, Harlow and Lane (Eds.) (1988) Antibodies: A Laboratory Manual, CSH Press; and Harlow et al. (1989) Antibodies, NY, Cold Spring Harbor Press). In order to generate polyclonal antibodies, an immunocompetent animal (e.g., mouse, rat, rabbit, goat, non-human primate, etc.) is immunized with an antigenic protein or cells or preparations comprising an antigenic protein. After a period of time, polyclonal antibody-containing serum is obtained by bleeding or sacrificing the animal. The serum may be used in the form obtained from the animal or the antibodies may be partially or fully purified to provide immunoglobulin fractions or isolated antibody preparations.

[0067] Any form of antigen, or cells or preparations containing the antigen, can be used to generate an antibody that is specific for a determinant. The term “antigen” is used in a broad sense and may comprise any immunogenic fragment or determinant of the selected target including a single epitope, multiple epitopes, single or multiple domains or the entire extracellular domain (ECD). The antigen may be an isolated full-length protein, a cell surface protein (e.g., immunizing with cells expressing at least a portion of the antigen on their surface), or a soluble protein (e.g., immunizing with only the ECD portion of the protein). The antigen may be produced in a genetically modified cell. Any of the aforementioned antigens may be used alone or in combination with one or more immunogenicity enhancing adjuvants known in the art. The DNA encoding the antigen may be genomic or non-genomic (e.g., cDNA) and may encode at least a portion of the ECD, sufficient to elicit an immunogenic response. Any vector may be employed to transform the cells in which the antigen is expressed, including but not limited to adenoviral vectors, lentiviral vectors, plasmids, and non-viral vectors, such as cationic lipids.

[0068] 2. Monoclonal Antibodies

[0069] In selected embodiments, the invention contemplates use of monoclonal antibodies. As known in the art, the term “monoclonal antibody” or “mAb” refers to an antibody obtained from a population of substantially homogeneous antibodies, i.e., the individual antibodies comprising the population are identical except for possible mutations (e.g., naturally occurring mutations), that may be present in minor amounts.

[0070] Monoclonal antibodies can be prepared using a wide variety of techniques known in the art including hybridoma techniques, recombinant techniques, phage display technologies, transgenic animals (e.g., a XenoMouse®) or some combination thereof. For example, monoclonal antibodies can be produced using hybridoma and biochemical and genetic engineering techniques such as described in more detail in An, Zhigiang (ed.) Therapeutic Monoclonal Antibodies: From Bench to Clinic, John Wiley and Sons, 1^{st} ed. 2009; Shire et. al. (eds.) Current Trends in Monoclonal Antibody Development and Manufacturing, Springer Science+Business Media LLC, 1^{st} ed. 2010; Harlow et al., Antibodies: A Laboratory Manual, Cold Spring Harbor Laboratory Press, 2nd ed. 1988; Hammerling, et al., in: Monoclonal Antibodies and T-Cell Hybridomas 563-681 (Elsevier, N.Y., 1981). Following production of multiple monoclonal antibodies that bind specifically to a determinant, particularly effective antibodies may be selected through various screening processes, based on, for example, its affinity for the determinant or rate of internalization. Antibodies produced as described herein may be used as “source” antibodies and further modified to, for example, improve affinity for the target, improve its production in cell culture, reduce immunogenicity in vivo, create multispecific constructs, etc. A more detailed description of monoclonal antibody production and screening is set out below and in the appended Examples.

[0071] 3. Human Antibodies

[0072] In another embodiment, the antibodies may comprise fully human antibodies. The term “human antibody” refers to an antibody which possesses an amino acid sequence that corresponds to that of an antibody produced by a human and/or has been made using any of the techniques for making human antibodies described below.

[0073] Human antibodies can be produced using various techniques known in the art. In one embodiment, recombinant human antibodies may be isolated by screening a recombinant combinatorial antibody library prepared using phage display. In one embodiment, the library is a scFv phage or yeast display library, generated using human VL and VH cDNAs prepared from mRNA isolated from B-cells. Such techniques advantageously allow for the screening of large numbers of candidate antibodies and provide for relatively easy manipulation of candidate sequences (e.g., by affinity maturation or recombinant shuffling).

[0074] Human antibodies can also be made by introducing human immunoglobulin loci into transgenic animals, e.g., mice in which the endogenous immunoglobulin genes have been partially or completely inactivated and human immunoglobulin genes have been introduced. Upon challenge, human antibody production is observed, which closely resembles that seen in humans in all respects, including gene rearrangement, assembly and fully human antibody repertoire. This approach is described, for example, in U.S. Pat. Nos. 5,545,807; 5,545,806; 5,569,825; 5,625,126; 5,633,425; 5,661,016, and U.S. Pat. Nos. 6,075,181 and 6,150,584 regarding XenoMouse® technology; and Lonberg and Huszar, 1995, PMID: 7494109). Alternatively, a human antibody may be prepared via immortalization of human B lymphocytes producing an antibody directed against a target antigen (such B lymphocytes may be recovered from an individual suffering from a neoplastic disorder or may have been immunized in vitro). See, e.g., Cole et al., Monoclonal Antibodies and Cancer Therapy, Alan R. Liss, p. 77 (1985); Boerner et al., 1991, PMID: 2051030; and U.S. Pat. No. 5,750,373. As with other monoclonal antibodies such human antibodies may be used as source antibodies.

[0075] Moreover, such antibodies may be produced recombinantly after selected host cells have been transformed or transfected with the genetic material (from any source including those described immediately above) encoding the desired human heavy and light chains. Such non-naturally occurring recombinantly manufactured fully human antibody compositions are explicitly within the scope of the instant invention and may be used to provide the disclose anti-DLL3 ADCs.

[0076] 4. Derived Antibodies:

[0077] Once source antibodies have been generated, selected and isolated as described above they may be further altered to provide anti-DLL3 antibodies having improved pharmaceutical characteristics. Preferably the source antibodies are modified or altered using known molecular engineering techniques to provide derived antibodies having the desired therapeutic properties.

[0078] 4.1. Chimeric and Humanized Antibodies

[0079] Selected embodiments of the invention comprise murine monoclonal antibodies that immunospecifically bind to DLL3 and which can be considered “source” antibodies. In certain embodiments, antibodies of the invention can be derived from such “source” antibodies through optional modification of the constant region and/or the epitope-binding amino acid sequences of the source antibody. In various embodiments an antibody is “derived” from a source antibody if selected amino acids in the source antibody are altered through deletion, mutation, substitution, integration or combination. In another embodiment, a “derived” antibody is one in which fragments of the source antibody (e.g., one or more CDRs or the entire heavy and light chain variable regions) are combined with or incorporated into an acceptor antibody sequence to provide the derivative antibody (e.g. chimeric or humanized antibodies). These “derived” antibodies can be generated using standard molecular biological techniques as described below, such as, for example, to improve affinity for the determinant; to improve antibody stability; to improve production and yield in cell culture; to reduce immunogenicity in vivo; to reduce toxicity; to facilitate conjugation of an active moiety; or to create a multispecific antibody. Such antibodies may also be derived from source antibodies through modification of the mature molecule (e.g., glycosylation patterns or pegylation) by chemical means or post-translational modification.

[0080] In one embodiment, the antibodies of the invention comprise chimeric antibodies that are derived from protein segments from at least two different species or class of antibodies that have been covalently joined. The term “chimeric” antibody is directed to constructs in which a portion of the heavy and/or light chain is identical or homologous to corresponding sequences in antibodies from a particular species or belonging to a particular antibody class or subclass, while the remainder of the chain(s) is identical or homologous to corresponding sequences in antibodies from another species or belonging to another antibody class or subclass, as well as fragments of such antibodies (U.S. Pat. No. 4,816,567; Morrison et al., 1984, PMID: 6436822). In some embodiments chimeric antibodies of the instant invention may comprise all or most of the selected murine heavy and light chain variable regions operably linked to human light and heavy chain constant regions. In other selected embodiments, chimeric anti-DLL3 antibodies may be “derived” from the mouse antibodies disclosed herein.

[0081] In other embodiments, chimeric antibodies of the invention are “CDR-grafted” antibodies, where the CDRs (as defined using Kabat, Chothia, McCallum, etc.) are derived from a particular species or belonging to a particular antibody class or subclass, while the remainder of the antibody is largely derived from an antibody from another species or belonging to another antibody class or subclass. For use in humans, one or more selected rodent CDRs (e.g., mouse CDRs) may be grafted into a human acceptor antibody, replacing one or more of the naturally occurring CDRs of the human antibody. These constructs generally have the advantages of providing full strength human antibody functions, e.g., complement dependent cytotoxicity (CDC) and antibody-dependent cell-mediated cytotoxicity (ADCC) while reducing unwanted immune responses to the antibody by the subject. In one embodiment the CDR grafted antibodies will comprise one or more CDRs obtained from a mouse incorporated in a human framework sequence.

[0082] Similar to the CDR-grafted antibody is a “humanized” antibody. As used herein, a “humanized” antibody is a human antibody (acceptor antibody) comprising one or more amino acid sequences (e.g. CDR sequences) derived from one or more non-human antibodies (donor or source antibody). In certain embodiments, “back mutations” can be introduced into the humanized antibody, in which residues in one or more framework domains (FRs) of the variable region of the recipient human antibody are replaced by corresponding residues from the non-human species donor antibody. Such back mutations may to help maintain the appropriate three-dimensional configuration of the grafted CDR(s) and thereby improve affinity and antibody stability. Antibodies from various donor species may be used including, without limitation, mouse, rat, rabbit, or non-human primate. Furthermore, humanized antibodies may comprise new residues that are not found in the recipient antibody or in the donor antibody to, for example, further refine antibody performance. CDR grafted and humanized antibodies compatible with the instant invention comprising murine components from source antibodies and human components from acceptor antibodies are provided as set forth in the Examples below.

[0083] Various art-recognized techniques can be used to determine which human sequences to use as acceptor antibodies to provide humanized constructs in accordance with the instant invention. Compilations of compatible human germline sequences and methods of determining their suitability as acceptor sequences are disclosed, for example, in Dubel and Reichert (Eds.) (2014) Handbook of Therapeutic Antibodies, 2^{nd} Edition, Wiley-Blackwell GmbH; Tomlinson, I. A. et al. (1992) J. Mol. Biol. 227:776-798; Cook, G. P. et al. (1995) Immunol. Today 16: 237-242; Chothia, D. et al. (1992) J. Mol. Biol. 227:799-817; and Tomlinson et al. (1995) EMBO J 14:4628-4638). The V-BASE directory (VBASE2—Retter et al., Nucleic Acid Res. 33; 671-674, 2005) which provides a comprehensive directory of human immunoglobulin variable region sequences (compiled by Tomlinson, I. A. et al. MRC Centre for Protein Engineering, Cambridge, UK) may also be used to identify compatible acceptor sequences. Additionally, consensus human framework sequences described, for example, in U.S. Pat. No. 6,300,064 may also prove to be compatible acceptor sequences are can be used in accordance with the instant teachings. In general, human framework acceptor sequences are selected based on homology with the murine source framework sequences along with an analysis of the CDR canonical structures of the source and acceptor antibodies. The derived sequences of the heavy and light chain variable regions of the derived antibody may then be synthesized using art recognized techniques.

[0084] By way of example CDR grafted and humanized antibodies, and associated methods, are described in U.S. Pat. Nos. 6,180,370 and 5,693,762. For further details, see, e.g., Jones et al., 1986, (PMID: 3713831); and U.S. Pat. Nos. 6,982,321 and 7,087,409.

[0085] The sequence identity or homology of the CDR grafted or humanized antibody variable region to the human acceptor variable region may be determined as discussed herein and, when measured as such, will preferably share at least 60% or 65% sequence identity, more preferably at least 70%, 75%, 80%, 85%, or 90% sequence identity, even more preferably at least 93%, 95%, 98% or 99% sequence identity. Preferably, residue positions which are not identical differ by conservative amino acid substitutions. A “conservative amino acid substitution” is one in which an amino acid residue is substituted by another amino acid residue having a side chain (R group) with similar chemical properties (e.g., charge or hydrophobicity). In general, a conservative amino acid substitution will not substantially change the functional properties of a protein. In cases where two or more amino acid sequences differ from each other by conservative substitutions, the percent sequence identity or degree of similarity may be adjusted upwards to correct for the conservative nature of the substitution.

[0086] It will be appreciated that the annotated CDRs and framework sequences as provided in the appended FIGS. 1A and 1B are defined as per Kabat et al. using a proprietary Abysis database. However, as discussed herein one skilled in the art could readily identify CDRs in accordance with definitions provided by Chothia et al., ABM or MacCallum et al as well as Kabat et al. As such, anti-DLL3 humanized antibodies comprising one or more CDRs derived according to any of the aforementioned systems are explicitly held to be within the scope of the instant invention.

[0087] 4.2. Site-Specific Antibodies

[0088] The antibodies of the instant invention may be engineered to facilitate conjugation to a cytotoxin or other anti-cancer agent (as discussed in more detail below). It is advantageous for the antibody drug conjugate preparation to comprise a homogenous population of ADC molecules in terms of the position of the cytotoxin on the antibody and the drug to antibody ratio (DAR). Based on the instant disclosure one skilled in the art could readily fabricate site-specific engineered constructs as described herein. As used herein a “site-specific antibody” or “site-specific construct” means an antibody, or immunoreactive fragment thereof, wherein at least one amino acid in either the heavy or light chain is deleted, altered or substituted (preferably with another amino acid) to provide at least one free cysteine. Similarly, a “site-specific conjugate” shall be held to mean an ADC comprising a site-specific antibody and at least one cytotoxin or other compound conjugated to the unpaired or free cysteine(s). In certain embodiments the unpaired cysteine residue will comprise an unpaired intrachain residue. In other embodiments the free cysteine residue will comprise an unpaired interchain cysteine residue. In still other embodiments the free cysteine may be engineered into the amino acid sequence of the antibody (e.g., in the CH3 domain). In any event the site-specific antibody can be of various isotypes, for example, IgG, IgE, IgA or IgD; and within those classes the antibody can be of various subclasses, for example, IgG1, IgG2, IgG3 or IgG4. For IgG constructs the light chain of the antibody can comprise either a kappa or lambda isotype each incorporating a C214 that, in selected embodiments, may be unpaired due to a lack of a C220 residue in the IgG1 heavy chain.

[0089] Thus, as used herein, the terms “free cysteine” or “unpaired cysteine” may be used interchangeably unless otherwise dictated by context and shall mean any cysteine (or thiol containing) constituent of an antibody, whether naturally present or specifically incorporated in a selected residue position using molecular engineering techniques. In certain selected embodiments the free cysteine may comprise a naturally occurring cysteine whose native interchain or intrachain disulfide bridge partner has been substituted, eliminated or otherwise altered to disrupt the naturally occurring disulfide bridge under physiological conditions thereby rendering the unpaired cysteine suitable for site-specific conjugation. In other preferred embodiments the free or unpaired cysteine will comprise a cysteine residue that is selectively placed at a predetermined site within the antibody heavy or light chain amino acid sequences. It will be appreciated that, prior to conjugation, free or unpaired cysteines may be present as a thiol (reduced cysteine), as a capped cysteine (oxidized) or as a non-natural intramolecular disulfide bond (oxidized) with another free cysteine on the same antibody depending on the oxidation state of the system. As discussed in more detail below, mild reduction of this antibody construct will provide thiols available for site-specific conjugation. In particularly preferred embodiments the free or unpaired cysteines (whether naturally occurring or incorporated) will be subject to selective reduction and subsequent conjugation to provide homogenous DAR compositions.

[0090] It will be appreciated that the favorable properties exhibited by the disclosed engineered conjugate preparations is predicated, at least in part, on the ability to specifically direct the conjugation and largely limit the fabricated conjugates in terms of conjugation position and absolute DAR of the composition. Unlike most conventional ADC preparations the present invention need not rely entirely on partial or total reduction of the antibody to provide random conjugation sites and relatively uncontrolled generation of DAR species. Rather, in certain aspects the present invention preferably provides one or more predetermined unpaired (or free) cysteine sites by engineering the targeting antibody to disrupt one or more of the naturally occurring (i.e., “native”) interchain or intrachain disulfide bridges or to introduce a cysteine residue at any position. To this end it will be appreciated that, in selected embodiments, a cysteine residue may be incorporated anywhere along the antibody (or immunoreactive fragment thereof) heavy or light chain or appended thereto using standard molecular engineering techniques. In other preferred embodiments disruption of native disulfide bonds may be effected in combination with the introduction of a non-native cysteine (which will then comprise a free cysteine) that may then be used as a conjugation site.

[0091] In one embodiment the engineered antibody comprises at least one amino acid deletion or substitution of an intrachain or interchain cysteine residue. As used herein “interchain cysteine residue” means a cysteine residue that is involved in a native disulfide bond either between the light and heavy chain of an antibody or between the two heavy chains of an antibody while an “intrachain cysteine residue” is one naturally paired with another cysteine in the same heavy or light chain. In one embodiment the deleted or substituted interchain cysteine residue is involved in the formation of a disulfide bond between the light and heavy chain. In another embodiment the deleted or substituted cysteine residue is involved in a disulfide bond between the two heavy chains. In a typical embodiment, due to the complementary structure of an antibody, in which the light chain is paired with the VH and CH1 domains of the heavy chain and wherein the CH2 and CH3 domains of one heavy chain are paired with the CH2 and CH3 domains of the complementary heavy chain, a mutation or deletion of a single cysteine in either the light chain or in the heavy chain would result in two unpaired cysteine residues in the engineered antibody.

[0092] In some embodiments an interchain cysteine residue is deleted. In other embodiments an interchain cysteine is substituted for another amino acid (e.g., a naturally occurring amino acid). For example, the amino acid substitution can result in the replacement of an interchain cysteine with a neutral (e.g. serine, threonine or glycine) or hydrophilic (e.g. methionine, alanine, valine, leucine or isoleucine) residue. In one embodiment an interchain cysteine is replaced with a serine.

[0093] In some embodiments contemplated by the invention the deleted or substituted cysteine residue is on the light chain (either kappa or lambda) thereby leaving a free cysteine on the heavy chain. In other embodiments the deleted or substituted cysteine residue is on the heavy chain leaving the free cysteine on the light chain constant region. Upon assembly it will be appreciated that deletion or substitution of a single cysteine in either the light or heavy chain of an intact antibody results in a site-specific antibody having two unpaired cysteine residues.

[0094] In one embodiment the cysteine at position 214 (C214) of the IgG light chain (kappa or lambda) is deleted or substituted. In another embodiment the cysteine at position 220 (C220) on the IgG heavy chain is deleted or substituted. In further embodiments the cysteine at position 226 or position 229 on the heavy chain is deleted or substituted. In one embodiment C220 on the heavy chain is substituted with serine (C220S) to provide the desired free cysteine in the light chain. In another embodiment C214 in the light chain is substituted with serine (C214S) to provide the desired free cysteine in the heavy chain. Such site-specific constructs provided in Example 15. A summary of these constructs is shown in Table 2 immediately below where numbering is generally according to the Eu index as set forth in Kabat and WT stands for “wild-type” or native constant region sequences without alterations and delta (Δ) designates the deletion of an amino acid residue (e.g., C214Δ indicates that the cysteine at position 214 has been deleted).

TABLE 2

| | Antibody | |
|---|---|---|
| Designation | Component | Alteration |
| ss1 | Heavy Chain | C220S |
| | Light Chain | WT |
| ss2 | Heavy Chain | C220Δ |
| | Light Chain | WT |
| ss3 | Heavy Chain | WT |
| | Light Chain | C214Δ |
| ss4 | Heavy Chain | WT |
| | Light Chain | C214S |

[0095] In this regard and for the purposes of illustration the full length heavy (SEQ ID NO: 9) and light (SEQ ID NO: 8) chain amino acid sequences for the exemplary antibody hSC16.56ss1 are set forth immediately below. Note that the kappa light chain is identical to the light chain found in the hSC16.56 antibody while the hSC16.56ss1 heavy chain (SEQ ID NO: 9) is different from the heavy chain in the hSC16.56 antibody (SEQ ID NO: 7) in that it contains the C220S mutation which is underlined and bolded in the sequence below.

(SEQ ID NO: 9)
QVQLVQSGAEVKKPGASVKVSCKASGYTFTNYGMNWVRQAPGQGLEWM
GWINTYTGEPTYADDFKGRVTMTTDTSTSTAYMELRSLRSDDTAVYYC
ARIGDSSPSDYWGQGTLVTVSSASTKGPSVFPLAPSSKSTSGGTAALG
CLVKDYFPEPVTVSWNSGALTSGVHTFPAVLQSSGLYSLSSVVTVPSS
SLGTQTYICNVNHKPSNTKVDKKVEPKSSDKTHTCPPCPAPELLGGPS
VFLFPPKPKDTLMISRTPEVTCVVVDVSHEDPEVKFNWYVDGVEVHNA
KTKPREEQYNSTYRVVSVLTVLHQDWLNGKEYKCKVSNKALPAPIEKT
ISKAKGQPREPQVYTLPPSRDELTKNQVSLTCLVKGFYPSDIAVEWES
NGQPENNYKTTPPVLDSDGSFFLYSKLTVDKSRWQQGNVFSCSVMHEA
LHNHYTQKSLSLSPG.
(SEQ ID NO: 8)
EIVMTQSPATLSVSPGERATLSCKASQSVSNDVVWYQQKPGQAPRLLI
YYASNRYTGIPARFSGSGSGTEFTLTISSLQSEDFAVYYCQQDYTSPW
TFGQGTKLEIKRTVAAPSVFIFPPSDEQLKSGTASVVCLLNNFYPREA
KVQWKVDNALQSGNSQESVTEQDSKDSTYSLSSTLTLSKADYEKHKVY
ACEVTHQGLSSPVTKSFNRGEC.

[0096] With regard to the introduction or addition of a cysteine residue or residues to provide a free cysteine (as opposed to disrupting a native disulfide bond) compatible position(s) on the antibody or antibody fragment may readily be discerned by one skilled in the art. Accordingly, in selected embodiments the cysteine(s) may be introduced in the CH1 domain, the CH2 domain or the CH3 domain or any combination thereof depending on the desired DAR, the antibody construct, the selected payload and the antibody target. In other preferred embodiments the cysteines may be introduced into a kappa or lambda CL domain and, in particularly preferred embodiments, in the c-terminal region of the CL domain. In each case other amino acid residues proximal to the site of cysteine insertion may be altered, removed or substituted to facilitate molecular stability, conjugation efficiency or provide a protective environment for the payload once it is attached. In particular embodiments, the substituted residues occur at any accessible sites of the antibody. By substituting such surface residues with cysteine, reactive thiol groups are thereby positioned at readily accessible sites on the antibody and may be selectively reduced as described further herein. In particular embodiments, the substituted residues occur at accessible sites of the antibody. By substituting those residues with cysteine, reactive thiol groups are thereby positioned at accessible sites of the antibody and may be used to selectively conjugate the antibody. In certain embodiments, any one or more of the following residues may be substituted with cysteine: V205 (Kabat numbering) of the light chain; A118 (Eu numbering) of the heavy chain; and S400 (Eu numbering) of the heavy chain Fc region. Additional substitution positions and methods of fabricating compatible site-specific antibodies are set forth in U.S. Pat. No. 7,521,541 which is incorporated herein in its entirety.

[0097] The strategy for generating antibody-drug conjugates with defined sites and stoichiometries of drug loading, as disclosed herein, is broadly applicable to all anti-DLL3 antibodies as it primarily involves engineering of the conserved constant domains of the antibody. As the amino acid sequences and native disulfide bridges of each class and subclass of antibody are well documented, one skilled in the art could readily fabricate engineered constructs of various DLL3 antibodies without undue experimentation and, accordingly, such constructs are expressly contemplated as being within the scope of the instant invention. This is particularly true of site-specific constructs comprising heavy and light chain variable region amino acid sequences as set forth in the instant disclosure.

[0098] 4.3. Constant Region Modifications and Altered Glycosylation

[0099] Selected embodiments of the present invention may also comprise substitutions or modifications of the constant region (i.e. the Fc region), including without limitation, amino acid residue substitutions, mutations and/or modifications, which result in a compound with characteristics including, but not limited to: altered pharmacokinetics, increased serum half-life, increase binding affinity, reduced immunogenicity, increased production, altered Fc ligand binding to an Fc receptor (FcR), enhanced or reduced ADCC or CDC, altered glycosylation and/or disulfide bonds and modified binding specificity.

[0100] Compounds with improved Fc effector functions can be generated, for example, through changes in amino acid residues involved in the interaction between the Fc domain and an Fc receptor (e.g., FcγRI, FcγRIIA and B, FcγRIII and FcRn), which may lead to increased cytotoxicity and/or altered pharmacokinetics, such as increased serum half-life (see, for example, Ravetch and Kinet, Annu. Rev. Immunol 9:457-92 (1991); Capel et al., Immunomethods 4:25-34 (1994); and de Haas et al., J. Lab. Clin. Med. 126:330-41 (1995).

[0101] In selected embodiments, antibodies with increased in vivo half-lives can be generated by modifying (e.g., substituting, deleting or adding) amino acid residues identified as involved in the interaction between the Fc domain and the FcRn receptor (see, e.g., International Publication Nos. WO 97/34631; WO 04/029207; U.S. Pat. No. 6,737,056 and U.S.P.N. 2003/0190311). With regard to such embodiments, Fc variants may provide half-lives in a mammal, preferably a human, of greater than 5 days, greater than 10 days, greater than 15 days, preferably greater than 20 days, greater than 25 days, greater than 30 days, greater than 35 days, greater than 40 days, greater than 45 days, greater than 2 months, greater than 3 months, greater than 4 months, or greater than 5 months. The increased half-life results in a higher serum titer which thus reduces the frequency of the administration of the antibodies and/or reduces the concentration of the antibodies to be administered. Binding to human FcRn in vivo and serum half-life of human FcRn high affinity binding polypeptides can be assayed, e.g., in transgenic mice or transfected human cell lines expressing human FcRn, or in primates to which the polypeptides with a variant Fc region are administered. WO 2000/42072 describes antibody variants with improved or diminished binding to FcRns. See also, e.g., Shields et al. J. Biol. Chem. 9(2):6591-6604 (2001). Surprisingly, certain ADCs of the instant invention exhibit protracted terminal half-lives (e.g., on the order of two weeks) without any antibody constant region modifications other than those used to provide optional site-specific conjugates.

[0102] In other embodiments, Fc alterations may lead to enhanced or reduced ADCC or CDC activity. As in known in the art, CDC refers to the lysing of a target cell in the presence of complement, and ADCC refers to a form of cytotoxicity in which secreted Ig bound onto FcRs present on certain cytotoxic cells (e.g., Natural Killer cells, neutrophils, and macrophages) enables these cytotoxic effector cells to bind specifically to an antigen-bearing target cell and subsequently kill the target cell with cytotoxins. In the context of the instant invention antibody variants are provided with “altered” FcR binding affinity, which is either enhanced or diminished binding as compared to a parent or unmodified antibody or to an antibody comprising a native sequence FcR. Such variants which display decreased binding may possess little or no appreciable binding, e.g., 0-20% binding to the FcR compared to a native sequence, e.g. as determined by techniques well known in the art. In other embodiments the variant will exhibit enhanced binding as compared to the native immunoglobulin Fc domain. It will be appreciated that these types of Fc variants may advantageously be used to enhance the effective anti-neoplastic properties of the disclosed antibodies. In yet other embodiments, such alterations lead to increased binding affinity, reduced immunogenicity, increased production, altered glycosylation and/or disulfide bonds (e.g., for conjugation sites), modified binding specificity, increased phagocytosis; and/or down regulation of cell surface receptors (e.g. B cell receptor; BCR), etc.

[0103] Still other embodiments comprise one or more engineered glycoforms, e.g., a site-specific antibody comprising an altered glycosylation pattern or altered carbohydrate composition that is covalently attached to the protein (e.g., in the Fc domain). See, for example, Shields, R. L. et al. (2002) J. Biol. Chem. 277:26733-26740. Engineered glycoforms may be useful for a variety of purposes, including but not limited to enhancing or reducing effector function, increasing the affinity of the antibody for a target or facilitating production of the antibody. In certain embodiments where reduced effector function is desired, the molecule may be engineered to express an aglycosylated form. Substitutions that may result in elimination of one or more variable region framework glycosylation sites to thereby eliminate glycosylation at that site are well known (see e.g. U.S. Pat. Nos. 5,714,350 and 6,350,861). Conversely, enhanced effector functions or improved binding may be imparted to the Fc containing molecule by engineering in one or more additional glycosylation sites.

[0104] Other embodiments include an Fc variant that has an altered glycosylation composition, such as a hypofucosylated antibody having reduced amounts of fucosyl residues or an antibody having increased bisecting GlcNAc structures. Such altered glycosylation patterns have been demonstrated to increase the ADCC ability of antibodies. Engineered glycoforms may be generated by any method known to one skilled in the art, for example by using engineered or variant expression strains, by co-expression with one or more enzymes (for example N-acetylglucosaminyltransferase III (GnTIII)), by expressing a molecule comprising an Fc region in various organisms or cell lines from various organisms or by modifying carbohydrate(s) after the molecule comprising Fc region has been expressed (see, for example, WO 2012/117002).

[0105] 4.4. Fragments

[0106] Regardless of which form of antibody (e.g. chimeric, humanized, etc.) is selected to practice the invention it will be appreciated that immunoreactive fragments, either by themselves or as part of an antibody drug conjugate, of the same may be used in accordance with the teachings herein. An “antibody fragment” comprises at least a portion of an intact antibody. As used herein, the term “fragment” of an antibody molecule includes antigen-binding fragments of antibodies, and the term “antigen-binding fragment” refers to a polypeptide fragment of an immunoglobulin or antibody that immunospecifically binds or reacts with a selected antigen or immunogenic determinant thereof or competes with the intact antibody from which the fragments were derived for specific antigen binding.

[0107] Exemplary site-specific fragments include: variable light chain fragments (VL), an variable heavy chain fragments (VH), scFv, F(ab′)2 fragment, Fab fragment, Fd fragment, Fv fragment, single domain antibody fragments, diabodies, linear antibodies, single-chain antibody molecules and multispecific antibodies formed from antibody fragments. In addition, an active site-specific fragment comprises a portion of the antibody that retains its ability to interact with the antigen/substrates or receptors and modify them in a manner similar to that of an intact antibody (though maybe with somewhat less efficiency). Such antibody fragments may further be engineered to comprise one or more free cysteines as described herein.

[0108] In other embodiments, an antibody fragment is one that comprises the Fc region and that retains at least one of the biological functions normally associated with the Fc region when present in an intact antibody, such as FcRn binding, antibody half-life modulation, ADCC function and complement binding. In one embodiment, an antibody fragment is a monovalent antibody that has an in vivo half-life substantially similar to an intact antibody. For example, such an antibody fragment may comprise an antigen binding arm linked to an Fc sequence comprising at least one free cysteine capable of conferring in vivo stability to the fragment.

[0109] As would be well recognized by those skilled in the art, fragments can be obtained by molecular engineering or via chemical or enzymatic treatment (such as papain or pepsin) of an intact or complete antibody or antibody chain or by recombinant means. See, e.g., Fundamental Immunology, W. E. Paul, ed., Raven Press, N.Y. (1999), for a more detailed description of antibody fragments.

[0110] 4.5. Multivalent Constructs

[0111] In other embodiments, the antibodies and conjugates of the invention may be monovalent or multivalent (e.g., bivalent, trivalent, etc.). As used herein, the term “valency” refers to the number of potential target binding sites associated with an antibody. Each target binding site specifically binds one target molecule or specific position or locus on a target molecule. When an antibody is monovalent, each binding site of the molecule will specifically bind to a single antigen position or epitope. When an antibody comprises more than one target binding site (multivalent), each target binding site may specifically bind the same or different molecules (e.g., may bind to different ligands or different antigens, or different epitopes or positions on the same antigen). See, for example, U.S.P.N. 2009/0130105.

[0112] In one embodiment, the antibodies are bispecific antibodies in which the two chains have different specificities, as described in Millstein et al., 1983, Nature, 305:537-539. Other embodiments include antibodies with additional specificities such as trispecific antibodies. Other more sophisticated compatible multispecific constructs and methods of their fabrication are set forth in U.S.P.N. 2009/0155255, as well as WO 94/04690; Suresh et al., 1986, Methods in Enzymology, 121:210; and WO96/27011.

[0113] Multivalent antibodies may immunospecifically bind to different epitopes of the desired target molecule or may immunospecifically bind to both the target molecule as well as a heterologous epitope, such as a heterologous polypeptide or solid support material. While selected embodiments may only bind two antigens (i.e. bispecific antibodies), antibodies with additional specificities such as trispecific antibodies are also encompassed by the instant invention. Bispecific antibodies also include cross-linked or “heteroconjugate” antibodies. For example, one of the antibodies in the heteroconjugate can be coupled to avidin, the other to biotin. Such antibodies have, for example, been proposed to target immune system cells to unwanted cells (U.S. Pat. No. 4,676,980), and for treatment of HIV infection (WO 91/00360, WO 92/200373, and EP 03089). Heteroconjugate antibodies may be made using any convenient cross-linking methods. Suitable cross-linking agents are well known in the art, and are disclosed in U.S. Pat. No. 4,676,980, along with a number of cross-linking techniques.

[0114] 5. Recombinant Production of Antibodies

[0115] Antibodies and fragments thereof may be produced or modified using genetic material obtained from antibody producing cells and recombinant technology (see, for example; Dubel and Reichert (Eds.) (2014) Handbook of Therapeutic Antibodies, 2^{nd} Edition, Wiley-Blackwell GmbH; Sambrook and Russell (Eds.) (2000) Molecular Cloning: A Laboratory Manual (3^{rd} Ed.), NY, Cold Spring Harbor Laboratory Press; Ausubel et al. (2002) Short Protocols in Molecular Biology: A Compendium of Methods from Current Protocols in Molecular Biology, Wiley, John & Sons, Inc.; and U.S. Pat. No. 7,709,611).

[0116] Another aspect of the invention pertains to nucleic acid molecules that encode the antibodies of the invention. The nucleic acids may be present in whole cells, in a cell lysate, or in a partially purified or substantially pure form. A nucleic acid is “isolated” or rendered substantially pure when separated from other cellular components or other contaminants, e.g., other cellular nucleic acids or proteins, by standard techniques, including alkaline/SDS treatment, CsCl banding, column chromatography, agarose gel electrophoresis and others well known in the art. A nucleic acid of the invention can be, for example, DNA (e.g. genomic DNA, cDNA), RNA and artificial variants thereof (e.g., peptide nucleic acids), whether single-stranded or double-stranded or RNA, RNA and may or may not contain introns. In selected embodiments the nucleic acid is a cDNA molecule.

[0117] Nucleic acids of the invention can be obtained using standard molecular biology techniques. For antibodies expressed by hybridomas (e.g., hybridomas prepared as described in the Examples below), cDNAs encoding the light and heavy chains of the antibody can be obtained by standard PCR amplification or cDNA cloning techniques. For antibodies obtained from an immunoglobulin gene library (e.g., using phage display techniques), nucleic acid encoding the antibody can be recovered from the library.

[0118] DNA fragments encoding VH and VL segments can be further manipulated by standard recombinant DNA techniques, for example to convert the variable region genes to full-length antibody chain genes, to Fab fragment genes or to a scFv gene. In these manipulations, a VL- or VH-encoding DNA fragment is operatively linked to another DNA fragment encoding another protein or protein fragment, such as an antibody constant region or a flexible linker. The term “operatively linked”, as used in this context, means that the two DNA fragments are joined such that the amino acid sequences encoded by the two DNA fragments remain in-frame.

[0119] The isolated DNA encoding the VH region can be converted to a full-length heavy chain gene by operatively linking the VH-encoding DNA to another DNA molecule encoding heavy chain constant regions (CH1, CH2 and CH3 in the case of IgG1). The sequences of human heavy chain constant region genes are known in the art (see e.g., Kabat, et al. (1991) (supra)) and DNA fragments encompassing these regions can be obtained by standard PCR amplification. The heavy chain constant region can be an IgG1, IgG2, IgG3, IgG4, IgA, IgE, IgM or IgD constant region, but most preferably is an IgG1 or IgG4 constant region. An exemplary IgG1 constant region is set forth in SEQ ID NO: 2. For a Fab fragment heavy chain gene, the VH-encoding DNA can be operatively linked to another DNA molecule encoding only the heavy chain CH1 constant region.

[0120] Isolated DNA encoding the VL region can be converted to a full-length light chain gene (as well as a Fab light chain gene) by operatively linking the VL-encoding DNA to another DNA molecule encoding the light chain constant region, CL. The sequences of human light chain constant region genes are known in the art (see e.g., Kabat, et al. (1991) (supra)) and DNA fragments encompassing these regions can be obtained by standard PCR amplification. The light chain constant region can be a kappa or lambda constant region, but most preferably is a kappa constant region. An exemplary compatible kappa light chain constant region is set forth in SEQ ID NO: 5.

[0121] Contemplated herein are certain polypeptides (e.g. antigens or antibodies) that exhibit “sequence identity”, sequence similarity” or “sequence homology” to the polypeptides of the invention. For example, a derived humanized antibody VH or VL domain may exhibit a sequence similarity with the source (e.g., murine) or acceptor (e.g., human) VH or VL domain. A “homologous” polypeptide may exhibit 65%, 70%, 75%, 80%, 85%, or 90% sequence identity. In other embodiments a “homologous” polypeptides may exhibit 93%, 95% or 98% sequence identity. As used herein, the percent homology between two amino acid sequences is equivalent to the percent identity between the two sequences. The percent identity between the two sequences is a function of the number of identical positions shared by the sequences (i.e., % homology=# of identical positions/total # of positions×100), taking into account the number of gaps, and the length of each gap, which need to be introduced for optimal alignment of the two sequences. The comparison of sequences and determination of percent identity between two sequences can be accomplished using a mathematical algorithm, as described in the non-limiting examples below.

[0122] The percent identity between two amino acid sequences can be determined using the algorithm of E. Meyers and W. Miller (Comput. Appl. Biosci., 4:11-17 (1988)) which has been incorporated into the ALIGN program (version 2.0), using a PAM120 weight residue table, a gap length penalty of 12 and a gap penalty of 4. In addition, the percent identity between two amino acid sequences can be determined using the Needleman and Wunsch (J. Mol. Biol. 48:444-453 (1970)) algorithm which has been incorporated into the GAP program in the GCG software package (available at www.gcg.com), using either a Blossum 62 matrix or a PAM250 matrix, and a gap weight of 16, 14, 12, 10, 8, 6, or 4 and a length weight of 1, 2, 3, 4, 5, or 6.

[0123] Additionally or alternatively, the protein sequences of the present invention can further be used as a “query sequence” to perform a search against public databases to, for example, identify related sequences. Such searches can be performed using the XBLAST program (version 2.0) of Altschul, et al. (1990) J. Mol. Biol. 215:403-10. BLAST protein searches can be performed with the XBLAST program, score=50, wordlength=3 to obtain amino acid sequences homologous to the antibody molecules of the invention. To obtain gapped alignments for comparison purposes, Gapped BLAST can be utilized as described in Altschul et al., (1997) Nucleic Acids Res. 25(17):3389-3402. When utilizing BLAST and Gapped BLAST programs, the default parameters of the respective programs (e.g., XBLAST and NBLAST) can be used.

[0124] Residue positions which are not identical may differ by conservative amino acid substitutions or by non-conservative amino acid substitutions. A “conservative amino acid substitution” is one in which an amino acid residue is substituted by another amino acid residue having a side chain with similar chemical properties (e.g., charge or hydrophobicity). In general, a conservative amino acid substitution will not substantially change the functional properties of a protein. In cases where two or more amino acid sequences differ from each other by conservative substitutions, the percent sequence identity or degree of similarity may be adjusted upwards to correct for the conservative nature of the substitution. In cases where there is a substitution with a non-conservative amino acid, in embodiments the polypeptide exhibiting sequence identity will retain the desired function or activity of the polypeptide of the invention (e.g., antibody.)

[0125] Also contemplated herein are nucleic acids that that exhibit “sequence identity”, sequence similarity” or “sequence homology” to the nucleic acids of the invention. A “homologous sequence” means a sequence of nucleic acid molecules exhibiting at least about 65%, 70%, 75%, 80%, 85%, or 90% sequence identity. In other embodiments, a “homologous sequence” of nucleic acids may exhibit 93%, 95% or 98% sequence identity to the reference nucleic acid.

[0126] The instant invention also provides vectors comprising such nucleic acids described above, which may be operably linked to a promoter (see, e.g., WO 86/05807; WO 89/01036; and U.S. Pat. No. 5,122,464); and other transcriptional regulatory and processing control elements of the eukaryotic secretory pathway. The invention also provides host cells harboring those vectors and host-expression systems.

[0127] As used herein, the term “host-expression system” includes any type of cellular system that can be engineered to generate either the nucleic acids or the polypeptides and antibodies of the invention. Such host-expression systems include, but are not limited to microorganisms (e.g., E. coli or B. subtilis) transformed or transfected with recombinant bacteriophage DNA or plasmid DNA; yeast (e.g., Saccharomyces) transfected with recombinant yeast expression vectors; or mammalian cells (e.g., COS, CHO-S, HEK293T, 3T3 cells) harboring recombinant expression constructs containing promoters derived from the genome of mammalian cells or viruses (e.g., the adenovirus late promoter). The host cell may be co-transfected with two expression vectors, for example, the first vector encoding a heavy chain derived polypeptide and the second vector encoding a light chain derived polypeptide. In particularly preferred aspects of the invention the disclosed antibodies will be produced using engineered CHO cells.

[0128] Methods of transforming mammalian cells are well known in the art. See, for example, U.S. Pat. Nos. 4,399,216, 4,912,040, 4,740,461, and 4,959,455. The host cell may also be engineered to allow the production of an antigen binding molecule with various characteristics (e.g. modified glycoforms or proteins having GnTIII activity).

[0129] For long-term, high-yield production of recombinant proteins stable expression is preferred. Accordingly, cell lines that stably express the selected antibody may be engineered using standard art recognized techniques and form part of the invention. Rather than using expression vectors that contain viral origins of replication, host cells can be transformed with DNA controlled by appropriate expression control elements (e.g., promoter or enhancer sequences, transcription terminators, polyadenylation sites, etc.), and a selectable marker. Any of the selection systems well known in the art may be used, including the glutamine synthetase gene expression system (the GS system) which provides an efficient approach for enhancing expression under selected conditions. The GS system is discussed in whole or part in connection with EP 0 216 846, EP 0 256 055, EP 0 323 997 and EP 0 338 841 and U.S. Pat. Nos. 5,591,639 and 5,879,936. Another compatible expression system for the development of stable cell lines is the Freedom™ CHO-S Kit (Life Technologies).

[0130] Once an antibody of the invention has been produced by recombinant expression or any other of the disclosed techniques, it may be purified or isolated by methods known in the art in that it is identified and separated and/or recovered from its natural environment and separated from contaminants that would interfere with diagnostic or therapeutic uses for the antibody or related ADC. Isolated antibodies include antibodies in situ within recombinant cells.

[0131] These isolated preparations may be purified using various art-recognized techniques, such as, for example, ion exchange and size exclusion chromatography, dialysis, diafiltration, and affinity chromatography, particularly Protein A or Protein G affinity chromatography. Compatible methods are discussed more fully in the Examples below.

[0132] 6. Post-Production Selection

[0133] No matter how obtained, antibody-producing cells (e.g., hybridomas, yeast colonies, etc.) may be selected, cloned and further screened for desirable characteristics including, for example, robust growth, high antibody production and desirable antibody characteristics such as high affinity for the antigen of interest. Hybridomas can be expanded in vitro in cell culture or in vivo in syngeneic immunocompromised animals. Methods of selecting, cloning and expanding hybridomas and/or colonies are well known to those of ordinary skill in the art. Once the desired antibodies are identified the relevant genetic material may be isolated, manipulated and expressed using common, art-recognized molecular biology and biochemical techniques.

[0134] The antibodies produced by naïve libraries (either natural or synthetic) may be of moderate affinity (Kₐ of about 10⁶ to 10⁷ M⁻¹). To enhance affinity, affinity maturation may be mimicked in vitro by constructing antibody libraries (e.g., by introducing random mutations in vitro by using error-prone polymerase) and reselecting antibodies with high affinity for the antigen from those secondary libraries (e.g. by using phage or yeast display). WO 9607754 describes a method for inducing mutagenesis in a CDR of an immunoglobulin light chain to create a library of light chain genes.

[0135] Various techniques can be used to select antibodies, including but not limited to, phage or yeast display in which a library of human combinatorial antibodies or scFv fragments is synthesized on phages or yeast, the library is screened with the antigen of interest or an antibody-binding portion thereof, and the phage or yeast that binds the antigen is isolated, from which one may obtain the antibodies or immunoreactive fragments (Vaughan et al., 1996, PMID: 9630891; Sheets et al., 1998, PMID: 9600934; Boder et al., 1997, PMID: 9181578; Pepper et al., 2008, PMID: 18336206). Kits for generating phage or yeast display libraries are commercially available. There also are other methods and reagents that can be used in generating and screening antibody display libraries (see U.S. Pat. No. 5,223,409; WO 92/18619, WO 91/17271, WO 92/20791, WO 92/15679, WO 93/01288, WO 92/01047, WO 92/09690; and Barbas et al., 1991, PMID: 1896445). Such techniques advantageously allow for the screening of large numbers of candidate antibodies and provide for relatively easy manipulation of sequences (e.g., by recombinant shuffling).

### IV. CHARACTERISTICS OF ANTIBODIES

[0136] In certain embodiments, antibody-producing cells (e.g., hybridomas or yeast colonies) may be selected, cloned and further screened for favorable properties including, for example, robust growth, high antibody production and, as discussed in more detail below, desirable site-specific antibody characteristics. In other cases characteristics of the antibody may be imparted by selecting a particular antigen (e.g., a specific DLL3 isoform) or immunoreactive fragment of the target antigen for inoculation of the animal. In still other embodiments the selected antibodies may be engineered as described above to enhance or refine immunochemical characteristics such as affinity or pharmacokinetics.

[0137] A. Neutralizing Antibodies

[0138] In certain embodiments, the conjugates will comprise “neutralizing” antibodies or derivatives or fragments thereof. That is, the present invention may comprise antibody molecules that bind specific domains, motifs or epitopes and are capable of blocking, reducing or inhibiting the biological activity of DLL3. More generally the term “neutralizing antibody” refers to an antibody that binds to or interacts with a target molecule or ligand and prevents binding or association of the target molecule to a binding partner such as a receptor or substrate, thereby interrupting a biological response that otherwise would result from the interaction of the molecules.

[0139] It will be appreciated that competitive binding assays known in the art may be used to assess the binding and specificity of an antibody or immunologically functional fragment or derivative thereof. With regard to the instant invention an antibody or fragment will be held to inhibit or reduce binding of DLL3 to a binding partner or substrate when an excess of antibody reduces the quantity of binding partner bound to DLL3 by at least about 20%, 30%, 40%, 50%, 60%, 70%, 80%, 85%, 90%, 95%, 97%, 99% or more as measured, for example, by Notch receptor activity or in an in vitro competitive binding assay. In the case of antibodies to DLL3 for example, a neutralizing antibody or antagonist will preferably alter Notch receptor activity by at least about 20%, 30%, 40%, 50%, 60%, 70%, 80%, 85%, 90%, 95%, 97%, 99% or more. It will be appreciated that this modified activity may be measured directly using art-recognized techniques or may be measured by the impact the altered activity has downstream (e.g., oncogenesis, cell survival or activation or suppression of Notch responsive genes). Preferably, the ability of an antibody to neutralize DLL3 activity is assessed by inhibition of DLL3 binding to a Notch receptor or by assessing its ability to relieve DLL3 mediated repression of Notch signaling.

[0140] B. Internalizing Antibodies

[0141] In certain embodiments the antibodies may comprise internalizing antibodies such that the antibody will bind to a determinant and will be internalized (along with any conjugated pharmaceutically active moiety) into a selected target cell including tumorigenic cells. The number of antibody molecules internalized may be sufficient to kill an antigen-expressing cell, especially an antigen-expressing tumorigenic cell. Depending on the potency of the antibody or, in some instances, antibody drug conjugate, the uptake of a single antibody molecule into the cell may be sufficient to kill the target cell to which the antibody binds. With regard to the instant invention there is evidence that a substantial portion of expressed DLL3 protein remains associated with the tumorigenic cell surface, thereby allowing for localization and internalization of the disclosed antibodies or ADCs. In selected embodiments such antibodies will be associated with, or conjugated to, one or more drugs that kill the cell upon internalization. In some embodiments the ADCs of the instant invention will comprise an internalizing site-specific ADC.

[0142] As used herein, an antibody that “internalizes” is one that is taken up (along with any conjugated cytotoxin) by a target cell upon binding to an associated determinant. The number of such ADCs internalized will preferably be sufficient to kill the determinant-expressing cell, especially a determinant-expressing cancer stem cell. Depending on the potency of the cytotoxin or ADC as a whole, in some instances the uptake of a few antibody molecules into the cell is sufficient to kill the target cell to which the antibody binds. For example, certain drugs such as PBDs or calicheamicin are so potent that the internalization of a few molecules of the toxin conjugated to the antibody is sufficient to kill the target cell. Whether an antibody internalizes upon binding to a mammalian cell can be determined by various art-recognized assays (e.g., saporin assays such as Mab-Zap and Fab-Zap; Advanced Targeting Systems). Methods of detecting whether an antibody internalizes into a cell are also described in U.S. Pat. No. 7,619,068.

[0143] C. Depleting Antibodies

[0144] In other embodiments the antibodies of the invention are depleting antibodies. The term “depleting” antibody refers to an antibody that preferably binds to an antigen on or near the cell surface and induces, promotes or causes the death of the cell (e.g., by CDC, ADCC or introduction of a cytotoxic agent). In embodiments, the selected depleting antibodies will be conjugated to a cytotoxin.

[0145] Preferably a depleting antibody will be able to kill at least 20%, 30%, 40%, 50%, 60%, 70%, 80%, 85%, 90%, 95%, 97%, or 99% of DLL3-expressing cells in a defined cell population. In some embodiments the cell population may comprise enriched, sectioned, purified or isolated tumorigenic cells, including cancer stem cells. In other embodiments the cell population may comprise whole tumor samples or heterogeneous tumor extracts that comprise cancer stem cells. Standard biochemical techniques may be used to monitor and quantify the depletion of tumorigenic cells in accordance with the teachings herein.

[0146] D. Binding Affinity

[0147] Disclosed herein are antibodies that have a high binding affinity for a specific determinant e.g. DLL3. The term “K_{D}” refers to the dissociation constant or apparent affinity of a particular antibody-antigen interaction. An antibody of the invention can immunospecifically bind its target antigen when the dissociation constant K_{D} (k_{off}/kₒₙ) is ≤10⁻⁷ M. The antibody specifically binds antigen with high affinity when the K_{D} is 5×10⁻⁹ M, and with very high affinity when the K_{D} is ≤5×10⁻¹⁰ M. In one embodiment of the invention, the antibody has a K_{D} of ≤10⁻⁹ M and an off-rate of about 1×10⁻⁴/sec. In one embodiment of the invention, the off-rate is <1×10⁻⁵/sec. In other embodiments of the invention, the antibodies will bind to a determinant with a K_{D} of between about 10⁻⁷ M and 10⁻¹⁰ M, and in yet another embodiment it will bind with a K_{D}≤2×10⁻¹⁰ M. Still other selected embodiments of the invention comprise antibodies that have a K_{D} (k_{off}/kₒₙ) of less than 10⁻⁶ M, less than 5×10⁻⁶ M, less than 10⁻⁷ M, less than 5×10⁻⁷ M, less than 10⁻⁸ M, less than 5×10⁻⁸ M, less than 10⁻⁹ M, less than 5×10⁻⁹ M, less than 10⁻¹⁰ M, less than 5×10⁻¹⁰ M, less than 10⁻¹¹ M, less than 5×10⁻¹¹ M, less than 10⁻¹² M, less than 5×10⁻¹² M, less than 10⁻¹³ M, less than 5×10⁻¹³ M, less than 10⁻¹⁴M, less than 5×10⁻¹⁴M, less than 10⁻¹⁵ M or less than 5×10⁻¹⁵ M.

[0148] In certain embodiments, an antibody of the invention that immunospecifically binds to a determinant e.g. DLL3 may have an association rate constant or kₒₙ (or kₐ) rate (antibody+antigen (Ag)^{k}ₒₙ←antibody-Ag) of at least 10⁵M⁻¹s⁻¹, at least 2×10⁵M⁻¹s⁻¹, at least 5×10⁵M⁻¹s⁻¹, at least 10⁶M⁻¹s⁻¹, at least 5×10⁶M⁻¹s⁻¹, at least 10⁷M⁻¹s⁻¹, at least 5×10⁷M⁻¹s⁻¹, or at least 10⁸M⁻¹s⁻¹.

[0149] In another embodiment, an antibody of the invention that immunospecifically binds to a determinant e.g. DLL3 may have a disassociation rate constant or k_{off} (or k_{d}) rate (antibody+antigen (Ag)^{k}_{off}←antibody-Ag) of less than 10⁻¹s⁻¹, less than 5×10⁻¹s⁻¹, less than 10⁻²s⁻¹, less than 5×10⁻² s^{-′}, less than 10⁻³s⁻¹, less than 5×10⁻³s⁻¹, less than 10⁻⁴ s⁻¹, less than 5×10⁴ s⁻¹, less than 10⁻⁵s⁻¹, less than 5×10⁻⁵s⁻¹, less than 10⁻⁶s⁻¹, less than 5×10⁻⁶ s⁻¹ less than 10⁻⁷s⁻¹, less than 5×10⁻⁷s⁻¹, less than 10⁻⁸ s⁻¹, less than 5×10⁻⁸s⁻¹, less than 10⁻⁸s⁻¹, less than 5×10⁻⁸s⁻¹ or less than 10⁻¹⁰s⁻¹.

[0150] Binding affinity may be determined using various techniques known in the art, for example, surface plasmon resonance, bio-layer interferometry, dual polarization interferometry, static light scattering, dynamic light scattering, isothermal titration calorimetry, ELISA, analytical ultracentrifugation, and flow cytometry.

[0151] E. Binning and Epitope Mapping

[0152] Antibodies disclosed herein may be characterized in terms of the discrete epitope with which they associate. An “epitope” is the portion(s) of a determinant to which the antibody or immunoreactive fragment specifically binds. Immunospecific binding can be confirmed and defined based on binding affinity, as described above, or by the preferential recognition by the antibody of its target antigen in a complex mixture of proteins and/or macromolecules (e.g. in competition assays). A “linear epitope”, is formed by contiguous amino acids in the antigen that allow for immunospecific binding of the antibody. The ability to preferentially bind linear epitopes is typically maintained even when the antigen is denatured. Conversely, a “conformational epitope”, usually comprises non-contiguous amino acids in the antigen's amino acid sequence but, in the context of the antigen's secondary, tertiary or quaternary structure, are sufficiently proximate to be bound concomitantly by a single antibody. When antigens with conformational epitopes are denatured, the antibody will typically no longer recognize the antigen. An epitope (contiguous or non-contiguous) typically includes at least 3, and more usually, at least 5 or 8-10 or 12-20 amino acids in a unique spatial conformation.

[0153] It is also possible to characterize the antibodies of the invention in terms of the group or “bin” to which they belong. “Binning” refers to the use of competitive antibody binding assays to identify pairs of antibodies that are incapable of binding an immunogenic determinant simultaneously, thereby identifying antibodies that “compete” for binding. Competing antibodies may be determined by an assay in which the antibody or immunologically functional fragment being tested prevents or inhibits specific binding of a reference antibody to a common antigen. Typically, such an assay involves the use of purified antigen (e.g., DLL3 or a domain or fragment thereof) bound to a solid surface or cells, an unlabeled test antibody and a labeled reference antibody. Competitive inhibition is measured by determining the amount of label bound to the solid surface or cells in the presence of the test antibody. Additional details regarding methods for determining competitive binding are provided in the Examples herein. Usually, when a competing antibody is present in excess, it will inhibit specific binding of a reference antibody to a common antigen by at least 30%, 40%, 45%, 50%, 55%, 60%, 65%, 70% or 75%. In some instance, binding is inhibited by at least 80%, 85%, 90%, 95%, or 97% or more. Conversely, when the reference antibody is bound it will preferably inhibit binding of a subsequently added test antibody (i.e., a DLL3 antibody) by at least 30%, 40%, 45%, 50%, 55%, 60%, 65%, 70% or 75%. In some instance, binding of the test antibody is inhibited by at least 80%, 85%, 90%, 95%, or 97% or more.

[0154] Generally binning or competitive binding may be determined using various art-recognized techniques, such as, for example, immunoassays such as western blots, radioimmunoassays, enzyme linked immunosorbent assay (ELISA), “sandwich” immunoassays, immunoprecipitation assays, precipitin reactions, gel diffusion precipitin reactions, immunodiffusion assays, agglutination assays, complement-fixation assays, immunoradiometric assays, fluorescent immunoassays and protein A immunoassays. Such immunoassays are routine and well known in the art (see, Ausubel et al, eds, (1994) Current Protocols in Molecular Biology, Vol. 1, John Wiley & Sons, Inc., New York). Additionally, cross-blocking assays may be used (see, for example, WO 2003/48731; and Harlow et al. (1988) Antibodies, A Laboratory Manual, Cold Spring Harbor Laboratory, Ed Harlow and David Lane).

[0155] Other technologies used to determine competitive inhibition (and hence “bins”), include: surface plasmon resonance using, for example, the BIAcore™ 2000 system (GE Healthcare); bio-layer interferometry using, for example, a ForteBio® Octet RED (ForteBio); or flow cytometry bead arrays using, for example, a FACSCanto II (BD Biosciences) or a multiplex LUMINEX™ detection assay (Luminex).

[0156] Luminex is a bead-based immunoassay platform that enables large scale multiplexed antibody pairing. The assay compares the simultaneous binding patterns of antibody pairs to the target antigen. One antibody of the pair (capture mAb) is bound to Luminex beads, wherein each capture mAb is bound to a bead of a different color. The other antibody (detector mAb) is bound to a fluorescent signal (e.g. phycoerythrin (PE)). The assay analyzes the simultaneous binding (pairing) of antibodies to an antigen and groups together antibodies with similar pairing profiles. Similar profiles of a detector mAb and a capture mAb indicates that the two antibodies bind to the same or closely related epitopes. In one embodiment, pairing profiles can be determined using Pearson correlation coefficients to identify the antibodies which most closely correlate to any particular antibody on the panel of antibodies that are tested. In embodiments a test/detector mAb will be determined to be in the same bin as a reference/capture mAb if the Pearson's correlation coefficient of the antibody pair is at least 0.9. In other embodiments the Pearson's correlation coefficient is at least 0.8, 0.85, 0.87 or 0.89. In further embodiments, the Pearson's correlation coefficient is at least 0.91, 0.92, 0.93, 0.94, 0.95, 0.96, 0.97, 0.98, 0.99 or 1. Other methods of analyzing the data obtained from the Luminex assay are described in U.S. Pat. No. 8,568,992. The ability of Luminex to analyze 100 different types of beads (or more) simultaneously provides almost unlimited antigen and/or antibody surfaces, resulting in improved throughput and resolution in antibody epitope profiling over a biosensor assay (Miller, et al., 2011, PMID: 21223970).

[0157] Similarly binning techniques comprising surface plasmon resonance are compatible with the instant invention. As used herein “surface plasmon resonance,” refers to an optical phenomenon that allows for the analysis of real-time specific interactions by detection of alterations in protein concentrations within a biosensor matrix. Using commercially available equipment such as the BIAcore™ 2000 system it may readily be determined if selected antibodies compete with each other for binding to a defined antigen.

[0158] In other embodiments, a technique that can be used to determine whether a test antibody “competes” for binding with a reference antibody is “bio-layer interferometry”, an optical analytical technique that analyzes the interference pattern of white light reflected from two surfaces: a layer of immobilized protein on a biosensor tip, and an internal reference layer. Any change in the number of molecules bound to the biosensor tip causes a shift in the interference pattern that can be measured in real-time. Such biolayer interferometry assays may be conducted using a ForteBio® Octet RED machine as follows. A reference antibody (Ab1) is captured onto an anti-mouse capture chip, a high concentration of non-binding antibody is then used to block the chip and a baseline is collected. Monomeric, recombinant target protein is then captured by the specific antibody (Ab1) and the tip is dipped into a well with either the same antibody (Ab1) as a control or into a well with a different test antibody (Ab2). If no further binding occurs, as determined by comparing binding levels with the control Ab1, then Ab1 and Ab2 are determined to be “competing” antibodies. If additional binding is observed with Ab2, then Ab1 and Ab2 are determined not to compete with each other. This process can be expanded to screen large libraries of unique antibodies using a full row of antibodies in a 96-well plate representing unique bins. In embodiments a test antibody will compete with a reference antibody if the reference antibody inhibits specific binding of the test antibody to a common antigen by at least 40%, 45%, 50%, 55%, 60%, 65%, 70% or 75%. In other embodiments, binding is inhibited by at least 80%, 85%, 90%, 95%, or 97% or more.

[0159] Once a bin, encompassing a group of competing antibodies, has been defined further characterization can be carried out to determine the specific domain or epitope on the antigen to which that group of antibodies binds. Domain-level epitope mapping may be performed using a modification of the protocol described by Cochran et al., 2004, PMID: 15099763. Fine epitope mapping is the process of determining the specific amino acids on the antigen that comprise the epitope of a determinant to which the antibody binds.

[0160] In certain embodiments fine epitope mapping can be performed using phage or yeast display. Other compatible epitope mapping techniques include alanine scanning mutants, peptide blots (Reineke, 2004, PMID: 14970513), or peptide cleavage analysis. In addition, methods such as epitope excision, epitope extraction and chemical modification of antigens can be employed (Tomer, 2000, PMID: 10752610) using enzymes such as proteolytic enzymes (e.g., trypsin, endoproteinase Glu-C, endoproteinase Asp-N, chymotrypsin, etc.); chemical agents such as succinimidyl esters and their derivatives, primary amine-containing compounds, hydrazines and carbohydrazines, free amino acids, etc. In another embodiment Modification-Assisted Profiling, also known as Antigen Structure-based Antibody Profiling (ASAP) can be used to categorize large numbers of monoclonal antibodies directed against the same antigen according to the similarities of the binding profile of each antibody to chemically or enzymatically modified antigen surfaces (U.S.P.N. 2004/0101920).

[0161] Once a desired epitope on an antigen is determined, it is possible to generate additional antibodies to that epitope, e.g., by immunizing with a peptide comprising the selected epitope using techniques described herein.

### V. ANTIBODY CONJUGATES

[0162] In some embodiments the antibodies of the invention may be conjugated with pharmaceutically active or diagnostic moieties to form an “antibody drug conjugate” (ADC) or “antibody conjugate”. The term “conjugate” is used broadly and means the covalent or non-covalent association of any pharmaceutically active or diagnostic moiety with an antibody of the instant invention regardless of the method of association. In certain embodiments the association is effected through a lysine or cysteine residue of the antibody. In some embodiments the pharmaceutically active or diagnostic moieties may be conjugated to the antibody via one or more site-specific free cysteine(s). The disclosed ADCs may be used for therapeutic and diagnostic purposes.

[0163] The ADCs of the instant invention may be used to deliver cytotoxins or other payloads to the target location (e.g., tumorigenic cells and/or cells expressing DLL3). As used herein the terms “drug” or “warhead” may be used interchangeably and will mean a biologically active or detectable molecule or drug, including anti-cancer agents and cytotoxins as described below. A “payload” may comprise a drug or “warhead” in combination with an optional linker compound. The “warhead” on the conjugate may comprise peptides, proteins or prodrugs which are metabolized to an active agent in vivo, polymers, nucleic acid molecules, small molecules, binding agents, mimetic agents, synthetic drugs, inorganic molecules, organic molecules and radioisotopes. In an advantageous embodiment, the disclosed ADCs will direct the bound payload to the target site in a relatively unreactive, non-toxic state before releasing and activating the warhead. This targeted release of the warhead is preferably achieved through stable conjugation of the payloads (e.g., via one or more cysteines on the antibody) and the relatively homogeneous composition of the ADC preparations which minimize over-conjugated toxic ADC species. Coupled with drug linkers that are designed to largely release the warhead once it has been delivered to the tumor site, the conjugates of the instant invention can substantially reduce undesirable non-specific toxicity. This advantageously provides for relatively high levels of the active cytotoxin at the tumor site while minimizing exposure of non-targeted cells and tissue thereby providing an enhanced therapeutic index.

[0164] It will be appreciated that, while some embodiments of the invention comprise payloads incorporating therapeutic moieties (e.g., cytotoxins), other payloads incorporating diagnostic agents and biocompatible modifiers may benefit from the targeted release provided by the disclosed conjugates. Accordingly, any disclosure directed to exemplary therapeutic payloads is also applicable to payloads comprising diagnostic agents or biocompatible modifiers as discussed herein unless otherwise dictated by context. The selected payload may be covalently or non-covalently linked to, the antibody and exhibit various stoichiometric molar ratios depending, at least in part, on the method used to effect the conjugation. Conjugates of the instant invention may be generally represented by the formula:

[0165] Ab-[L-D]n or a pharmaceutically acceptable salt thereof wherein:
[0166] a) Ab comprises an anti-DLL3 antibody;
[0167] b) L comprises an optional linker;
[0168] c) D comprises a drug; and
[0169] d) n is an integer from about 1 to about 20.

[0170] Those of skill in the art will appreciate that conjugates according to the aforementioned formula may be fabricated using a number of different linkers and drugs and that conjugation methodology will vary depending on the selection of components. As such, any drug or drug linker compound that associates with a reactive residue (e.g., cysteine or lysine) of the disclosed antibodies are compatible with the teachings herein. Similarly, any reaction conditions that allow for conjugation (including site-specific conjugation) of the selected drug to an antibody are within the scope of the present invention. Notwithstanding the foregoing, some embodiments of the instant invention comprise selective conjugation of the drug or drug linker to free cysteines using stabilization agents in combination with mild reducing agents as described herein. Such reaction conditions tend to provide more homogeneous preparations with less non-specific conjugation and contaminants and correspondingly less toxicity.

[0171] A. Payloads and Warheads

[0172] 1. Therapeutic Agents

[0173] The antibodies of the invention may be conjugated, linked or fused to or otherwise associated with a pharmaceutically active moiety which is a therapeutic moiety or a drug such as an anti-cancer agent including, but not limited to, cytotoxic agents (or cytotoxins), cytostatic agents, anti-angiogenic agents, debulking agents, chemotherapeutic agents, radiotherapeutic agents, targeted anti-cancer agents, biological response modifiers, cancer vaccines, cytokines, hormone therapies, anti-metastatic agents and immunotherapeutic agents.

[0174] Exemplary anti-cancer agents or cytotoxins (including homologs and derivatives thereof) comprise 1-dehydrotestosterone, anthramycins, actinomycin D, bleomycin, calicheamicins (including n-acetyl calicheamicin), colchicin, cyclophosphamide, cytochalasin B, dactinomycin (formerly actinomycin), dihydroxy anthracin, dione, duocarmycin, emetine, epirubicin, ethidium bromide, etoposide, glucocorticoids, gramicidin D, lidocaine, maytansinoids such as DM-1 and DM-4 (Immunogen), mithramycin, mitomycin, mitoxantrone, paclitaxel, procaine, propranolol, puromycin, tenoposide, tetracaine and pharmaceutically acceptable salts or solvates, acids or derivatives of any of the above.

[0175] Additional compatible cytotoxins comprise dolastatins and auristatins, including monomethyl auristatin E (MMAE) and monomethyl auristatin F (MMAF) (Seattle Genetics), amanitins such as alpha-amanitin, beta-amanitin, gamma-amanitin or epsilon-amanitin (Heidelberg Pharma), DNA minor groove binding agents such as duocarmycin derivatives (Syntarga), alkylating agents such as modified or dimeric pyrrolobenzodiazepines (PBD), mechlorethamine, thioepa, chlorambucil, melphalan, carmustine (BCNU), lomustine (CCNU), cyclothosphamide, busulfan, dibromomannitol, streptozotocin, mitomycin C and cisdichlorodiamine platinum (II) (DDP) cisplatin, splicing inhibitors such as meayamycin analogs or derivatives (e.g., FR901464 as set forth in U.S. Pat. No. 7,825,267), tubular binding agents such as epothilone analogs and tubulysins, paclitaxel and DNA damaging agents such as calicheamicins and esperamicins, antimetabolites such as methotrexate, 6-mercaptopurine, 6-thioguanine, cytarabine, and 5-fluorouracil decarbazine, anti-mitotic agents such as vinblastine and vincristine and anthracyclines such as daunorubicin (formerly daunomycin) and doxorubicin and pharmaceutically acceptable salts or solvates, acids or derivatives of any of the above.

[0176] In selected embodiments the antibodies of the instant invention may be associated with anti-CD3 binding molecules to recruit cytotoxic T-cells and have them target tumorigenic cells (BiTE technology; see e.g., Fuhrmann et. al. (2010) Annual Meeting of AACR Abstract No. 5625).

[0177] In further embodiments ADCs of the invention may comprise cytotoxins comprising therapeutic radioisotopes conjugated using appropriate linkers. Exemplary radioisotopes that may be compatible with such embodiments include, but are not limited to, iodine (¹³¹I, ¹²⁵I, ¹²³I, ¹²¹I), carbon (¹⁴C), copper (⁶²Cu, ⁶⁴Cu, ⁶⁷Cu), sulfur (³⁵S), radium (²²³R), tritium (³H), indium (¹¹⁵In, ¹¹³In, ¹¹²In, ¹¹¹In), bismuth (²¹²Bi, ²¹³Bi), technetium (⁹⁹Tc), thallium (²⁰¹Ti), gallium (⁶⁸Ga, ⁶⁷Ga), palladium (¹⁰³Pd), molybdenum (⁹⁹Mo), xenon (¹³³Xe), fluorine (¹⁸F), ¹⁵³Sm, ¹⁷⁷Lu, ¹⁵⁹Gd, ¹⁴⁹Pm, ¹⁴⁰La, ¹⁷⁵Yb, ¹⁶⁶Ho, ⁹⁰Y, ⁴⁷Sc, ¹⁸⁶Re, ¹⁸⁸Re, ¹⁴²Pr, ¹⁰⁵Rh, ⁹⁷Ru, ⁶⁸Ge, ⁵⁷Co, ⁶⁵Zn, ⁸⁵Sr, ³²P ¹⁵³Gd, ¹⁶⁹Yb, ⁵¹Cr ⁵⁴Mn, ⁷⁵Se, ¹¹³Sn, ¹¹⁷Sn, ²²⁵Ac, ⁷⁶Br, and ²¹¹At. Other radionuclides are also available as diagnostic and therapeutic agents, especially those in the energy range of 60 to 4,000 keV.

[0178] In other selected embodiments the ADCs of the instant invention will be conjugated to a cytotoxic benzodiazepine derivative warhead. Compatible benzodiazepine derivatives (and optional linkers) that may be conjugated to the disclosed antibodies are described, for example, in U.S. Pat. No. 8,426,402 and PCT filings WO2012/128868 and WO2014/031566. As with the PBDs discussed below, compatible benzodiazepine derivatives are believed to bind in the minor grove of DNA and inhibit nucleic acid synthesis. Such compounds reportedly have potent antitumor properties and, as such, are particularly suitable for use in the ADCs of the instant invention.

[0179] In certain embodiments, the ADCs of the invention may comprise PBDs, and pharmaceutically acceptable salts or solvates, acids or derivatives thereof, as warheads. PBDs are alkylating agents that exert antitumor activity by covalently binding to DNA in the minor groove and inhibiting nucleic acid synthesis. PBDs have been shown to have potent antitumor properties while exhibiting minimal bone marrow depression. PBDs compatible with the invention may be linked to an antibody using several types of linkers (e.g., a peptidyl linker comprising a maleimido moiety with a free sulfhydryl), and in certain embodiments are dimeric in form (i.e., PBD dimers). Compatible PBDs (and optional linkers) that may be conjugated to the disclosed antibodies are described, for example, in U.S. Pat. Nos. 6,362,331, 7,049,311, 7,189,710, 7,429,658, 7,407,951, 7,741,319, 7,557,099, 8,034,808, 8,163,736, 2011/0256157 and PCT filings WO2011/130613, WO2011/128650, WO2011/130616, WO2014/057073 and WO2014/057074. Examples of PBD compounds compatible with the instant invention are shown below.

[0180] In this respect PBDs have been shown to have potent antitumor properties while exhibiting minimal bone marrow depression. PBDs compatible with the present invention may be linked to the DLL3 modulator using any one of several types of linker (e.g., a peptidyl linker comprising a maleimido moiety with a free sulfhydryl) and, in certain embodiments are dimeric in form (i.e., PBD dimers). PBDs are of the general structure:

[chemical structure]

[0181] They differ in the number, type and position of substituents, in both their aromatic A rings and pyrrolo C rings, and in the degree of saturation of the C ring. In the B-ring there is either an imine (N═C), a carbinolamine (NH—CH(OH)), or a carbinolamine methyl ether (NH—CH(OMe)) at the N10-C11 position which is the electrophilic center responsible for alkylating DNA. All of the known natural products have an (S)-configuration at the chiral C11a position which provides them with a right-handed twist when viewed from the C ring towards the A ring. This gives them the appropriate three-dimensional shape for isohelicity with the minor groove of B-form DNA, leading to a snug fit at the binding site (Kohn, In Antibiotics III. Springer-Verlag, New York, pp. 3-11 (1975); Hurley and Needham-VanDevanter, Acc. Chem. Res., 19, 230-237 (1986)). Their ability to form an adduct in the minor groove, enables them to interfere with DNA processing, hence their use as cytotoxic agents. As alluded to above, in order to increase their potency PBDs are often used in a dimeric form which may be conjugated to anti-DLL3 antibodies as described herein.

[0182] In particularly preferred embodiments compatible PBDs that may be conjugated to the disclosed modulators are described, in U.S.P.N. 2011/0256157. In this disclosure, PBD dimers, i.e. those comprising two PBD moieties may be preferred. Thus, preferred conjugates of the present invention are those having the formula (AB) or (AC):

[chemical structure]

[0183] wherein:
[0184] the dotted lines indicate the optional presence of a double bond between C1 and C2 or C2 and C3;
[0185] R² is independently selected from H, OH, ═O, ═CH₂, CN, R, OR, ═CH—R^{D}, ═C(R^{D})₂, O—SO₂—R, CO₂R and COR, and optionally further selected from halo or dihalo;
[0186] where R^{D} is independently selected from R, CO₂R, COR, CHO, CO₂H, and halo;
[0187] R⁶ and R⁹ are independently selected from H, R, OH, OR, SH, SR, NH₂, NHR, NRR′, NO₂, Me₃Sn and halo;
[0188] R⁷ is independently selected from H, R, OH, OR, SH, SR, NH₂, NHR, NRR′, NO₂, Me₃Sn and halo;
[0189] R¹⁰ is a linker connected to a DLL3 antibody or fragment or derivative thereof, as described herein;
[0190] Q is independently selected from O, S and NH;
[0191] R¹¹ is either H, or R or, where Q is O, R¹¹ may be SO₃M, where M is a metal cation;
[0192] X is selected from O, S, or N(H) and in selected embodiments comprises O;
[0193] R″ is a C₃₋₁₂ alkylene group, which chain may be interrupted by one or more heteroatoms (e.g., O, S, N(H), NMe and/or aromatic rings, e.g. benzene or pyridine, which rings are optionally substituted);
[0194] R and R′ are each independently selected from optionally substituted C₁₋₁₂ alkyl, C₃₋₂₀ heterocyclyl and C₅₋₂₀ aryl groups, and optionally in relation to the group NRR′, R and R′ together with the nitrogen atom to which they are attached form an optionally substituted 4-, 5-, 6- or 7-membered heterocyclic ring; and
[0195] wherein R^{2″}, R^{6″}, R^{7″}, R^{9″}, X″, Q″ and R^{11″} (where present) are as defined according to R², R⁶, R⁷, R⁹, X, Q and R¹¹ respectively, and R^{C} is a capping group.

[0196] Selected embodiments comprising the aforementioned structures are described in more detail immediately below.

[0197] Double Bond

[0198] In one embodiment, there is no double bond present between C1 and C2, and C2 and C3.

[0199] In one embodiment, the dotted lines indicate the optional presence of a double bond between C2 and C3, as shown below:

[chemical structure]

[0200] In one embodiment, a double bond is present between C2 and C3 when R² is C₅₋₂₀ aryl or C₁₋₁₂ alkyl.

[0201] In one embodiment, the dotted lines indicate the optional presence of a double bond between C1 and C2, as shown below:

[chemical structure]

[0202] In one embodiment, a double bond is present between C1 and C2 when R² is C₅₋₂₀ aryl or C₁₋₁₂ alkyl.

[0203] R²

[0204] In one embodiment, R² is independently selected from H, OH, ═O, ═CH₂, CN, R, OR, ═CH—R^{D}, ═C(R^{D})₂, O—SO₂—R, CO₂R and COR, and optionally further selected from halo or dihalo.

[0205] In one embodiment, R² is independently selected from H, OH, ═O, ═CH₂, CN, R, OR, ═CH—R^{D}, ═C(R^{D})₂, O—SO₂—R, CO₂R and COR.

[0206] In one embodiment, R² is independently selected from H, ═O, ═CH₂, R, ═CH—R^{D}, and ═C(R^{D})₂.

[0207] In one embodiment, R² is independently H.

[0208] In one embodiment R² is independently R wherein R comprises CH₃.

[0209] In one embodiment, R² is independently ═O.

[0210] In one embodiment, R² is independently ═CH₂.

[0211] In one embodiment, R² is independently ═CH—R^{D}. Within the PBD compound, the group ═CH—R^{D} may have either configuration shown below:

[chemical structure]

[0212] In one embodiment, the configuration is configuration (I).

[0213] In one embodiment, R² is independently ═C(R^{D})₂.

[0214] In one embodiment, R² is independently ═CF₂.

[0215] In one embodiment, R² is independently R.

[0216] In one embodiment, R² is independently optionally substituted C₅₋₂₀ aryl.

[0217] In one embodiment, R² is independently optionally substituted C₁₋₁₂ alkyl.

[0218] In one embodiment, R² is independently optionally substituted C₅₋₂₀ aryl.

[0219] In one embodiment, R² is independently optionally substituted C₅₋₇ aryl.

[0220] In one embodiment, R² is independently optionally substituted C₈₋₁₀ aryl.

[0221] In one embodiment, R² is independently optionally substituted phenyl.

[0222] In one embodiment, R² is independently optionally substituted napthyl.

[0223] In one embodiment, R² is independently optionally substituted pyridyl.

[0224] In one embodiment, R² is independently optionally substituted quinolinyl or isoquinolinyl.

[0225] In one embodiment, R² bears one to three substituent groups, with 1 and 2 being more preferred, and singly substituted groups being most preferred. The substituents may be any position.

[0226] Where R² is a C₅₋₇ aryl group, a single substituent is preferably on a ring atom that is not adjacent the bond to the remainder of the compound, i.e. it is preferably β or γ to the bond to the remainder of the compound. Therefore, where the C₅₋₇ aryl group is phenyl, the substituent is preferably in the meta- or para-positions, and more preferably is in the para-position.

[0227] In one embodiment, R² is selected from:

[chemical structure]

[0228] where the asterisk indicates the point of attachment.

[0229] Where R² is a C₈₋₁₀ aryl group, for example quinolinyl or isoquinolinyl, it may bear any number of substituents at any position of the quinoline or isoquinoline rings. In some embodiments, it bears one, two or three substituents, and these may be on either the proximal and distal rings or both (if more than one substituent).

[0230] In one embodiment, where R² is optionally substituted, the substituents are selected from those substituents given in the substituent section below.

[0231] Where R is optionally substituted, the substituents are preferably selected from:

[0232] Halo, Hydroxyl, Ether, Formyl, Acyl, Carboxy, Ester, Acyloxy, Amino, Amido, Acylamido, Aminocarbonyloxy, Ureido, Nitro, Cyano and Thioether.

[0233] In one embodiment, where R or R² is optionally substituted, the substituents are selected from the group consisting of R, OR, SR, NRR′, NO₂, halo, CO₂R, COR, CONH₂, CONHR, and CONRR′.

[0234] Where R² is C₁₋₁₂ alkyl, the optional substituent may additionally include C₃₋₂₀ heterocyclyl and C₅₋₂₀ aryl groups.

[0235] Where R² is C₃₋₂₀ heterocyclyl, the optional substituent may additionally include C₁₋₁₂ alkyl and C₅₋₂₀ aryl groups.

[0236] Where R² is C₅₋₂₀ aryl groups, the optional substituent may additionally include C₃₋₂₀ heterocyclyl and C₁₋₁₂ alkyl groups.

[0237] It is understood that the term “alkyl” encompasses the sub-classes alkenyl and alkynyl as well as cycloalkyl. Thus, where R² is optionally substituted C₁₋₁₂ alkyl, it is understood that the alkyl group optionally contains one or more carbon-carbon double or triple bonds, which may form part of a conjugated system. In one embodiment, the optionally substituted C₁₋₁₂ alkyl group contains at least one carbon-carbon double or triple bond, and this bond is conjugated with a double bond present between C1 and C2, or C2 and C3. In one embodiment, the C₁₋₁₂ alkyl group is a group selected from saturated C₁₋₁₂ alkyl, C₂₋₁₂ alkenyl, C₂₋₁₂ alkynyl and C₃₋₁₂ cycloalkyl.

[0238] If a substituent on R² is halo, it is preferably F or Cl, more preferably Cl.

[0239] If a substituent on R² is ether, it may in some embodiments be an alkoxy group, for example, a C₁₋₇ alkoxy group (e.g. methoxy, ethoxy) or it may in some embodiments be a C₅₋₇ aryloxy group (e.g phenoxy, pyridyloxy, furanyloxy).

[0240] If a substituent on R² is C₁₋₇ alkyl, it may preferably be a C₁₋₄ alkyl group (e.g. methyl, ethyl, propyl, butyl).

[0241] If a substituent on R² is C₃₋₇ heterocyclyl, it may in some embodiments be C₆ nitrogen containing heterocyclyl group, e.g. morpholino, thiomorpholino, piperidinyl, piperazinyl. These groups may be bound to the rest of the PBD moiety via the nitrogen atom. These groups may be further substituted, for example, by C₁₋₄ alkyl groups.

[0242] If a substituent on R² is bis-oxy-C₁₋₃ alkylene, this is preferably bis-oxy-methylene or bis-oxy-ethylene.

[0243] Particularly preferred substituents for R² include methoxy, ethoxy, fluoro, chloro, cyano, bis-oxy-methylene, methyl-piperazinyl, morpholino and methyl-thienyl.

[0244] Particularly preferred substituted R² groups include, but are not limited to, 4-methoxy-phenyl, 3-methoxyphenyl, 4-ethoxy-phenyl, 3-ethoxy-phenyl, 4-fluoro-phenyl, 4-chloro-phenyl, 3,4-bisoxymethylene-phenyl, 4-methylthienyl, 4-cyanophenyl, 4-phenoxyphenyl, quinolin-3-yl and quinolin-6-yl, isoquinolin-3-yl and isoquinolin-6-yl, 2-thienyl, 2-furanyl, methoxynaphthyl, and naphthyl.

[0245] In one embodiment, R² is halo or dihalo. In one embodiment, R² is —F or —F₂, which substituents are illustrated below as (III) and (IV) respectively:

[chemical structure]

[0246] R^{D}

[0247] In one embodiment, R^{D} is independently selected from R, CO₂R, COR, CHO, CO₂H, and halo.

[0248] In one embodiment, R^{D} is independently R.

[0249] In one embodiment, R^{D} is independently halo.

[0250] R⁶

[0251] In one embodiment, R⁶ is independently selected from H, R, OH, OR, SH, SR, NH₂, NHR, NRR′, NO₂, Me₃Sn— and Halo.

[0252] In one embodiment, R⁶ is independently selected from H, OH, OR, SH, NH₂, NO₂ and Halo.

[0253] In one embodiment, R⁶ is independently selected from H and Halo.

[0254] In one embodiment, R⁶ is independently H.

[0255] In one embodiment, R⁶ and R⁷ together form a group —O—(CH₂)ₚ—O—, where p is 1 or 2.

[0256] R⁷

[0257] R⁷ is independently selected from H, R, OH, OR, SH, SR, NH₂, NHR, NRR′, NO₂, Me₃Sn and halo.

[0258] In one embodiment, R⁷ is independently OR.

[0259] In one embodiment, R⁷ is independently OR^{7A}, where R^{7A} is independently optionally substituted C₁₋₆ alkyl.

[0260] In one embodiment, R^{7A} is independently optionally substituted saturated C₁₋₆ alkyl.

[0261] In one embodiment, R^{7A} is independently CH₃.

[0262] In one embodiment, R^{7A} is independently optionally substituted C₂₋₄ alkenyl.

[0263] In one embodiment, R^{7A} is independently Me.

[0264] In one embodiment, R^{7A} is independently CH₂Ph.

[0265] In one embodiment, R^{7A} is independently allyl.

[0266] In one embodiment, the compound is a dimer where the R⁷ groups of each monomer form together a dimer bridge having the formula X—R″—X linking the monomers.

[0267] R⁹

[0268] In one embodiment, R⁹ is independently selected from H, R, OH, OR, SH, SR, NH₂, NHR, NRR′, NO₂, Me₃Sn— and Halo.

[0269] In one embodiment, R⁹ is independently H.

[0270] In one embodiment, R⁹ is independently R or OR.

[0271] R¹⁰

[0272] Preferably compatible linkers such as those described herein attach the DLL3 antibody to the PBD drug moiety through covalent bond(s) at the R¹⁰ position (i.e., N10).

[0273] Q

[0274] In certain embodiments Q is independently selected from O, S and NH.

[0275] In one embodiment, Q is independently 0.

[0276] In one embodiment, Q is independently S.

[0277] In one embodiment, Q is independently NH.

[0278] R¹¹

[0279] In selected embodiments R¹¹ is either H, or R or, where Q is O, R¹¹ may be SO₃M where M is a metal cation. The cation may be Nat.

[0280] In certain embodiments R¹¹ is H.

[0281] In certain embodiments R¹¹ is R.

[0282] In certain embodiments, where Q is O, R¹¹ is SO₃M where M is a metal cation. The cation may be Nat.

[0283] In certain embodiments where Q is O, R¹¹ is H.

[0284] In certain embodiments where Q is O, R¹¹ is R.

[0285] X

[0286] In one embodiment, X is selected from O, S, or N(H).

[0287] Preferably, X is O.

[0288] R″

[0289] R″ is a C₃₋₁₂ alkylene group, which chain may be interrupted by one or more heteroatoms, e.g. O, S, N(H), NMe and/or aromatic rings, e.g. benzene or pyridine, which rings are optionally substituted.

[0290] In one embodiment, R″ is a C₃₋₁₂ alkylene group, which chain may be interrupted by one or more heteroatoms and/or aromatic rings, e.g. benzene or pyridine.

[0291] In one embodiment, the alkylene group is optionally interrupted by one or more heteroatoms selected from O, S, and NMe and/or aromatic rings, which rings are optionally substituted.

[0292] In one embodiment, the aromatic ring is a C₅₋₂₀ arylene group, where arylene pertains to a divalent moiety obtained by removing two hydrogen atoms from two aromatic ring atoms of an aromatic compound, which moiety has from 5 to 20 ring atoms.

[0293] In one embodiment, R″ is a C₃₋₁₂ alkylene group, which chain may be interrupted by one or more heteroatoms, e.g. O, S, N(H), NMe and/or aromatic rings, e.g. benzene or pyridine, which rings are optionally substituted by NH₂.

[0294] In one embodiment, R″ is a C₃₋₁₂ alkylene group.

[0295] In one embodiment, R″ is selected from a C₃, C₅, C₇, C₉ and a C₁₁ alkylene group.

[0296] In one embodiment, R″ is selected from a C₃, C₅ and a C₇ alkylene group.

[0297] In one embodiment, R″ is selected from a C₃ and a C₅ alkylene group.

[0298] In one embodiment, R″ is a C₃ alkylene group.

[0299] In one embodiment, R″ is a C₅ alkylene group.

[0300] The alkylene groups listed above may be optionally interrupted by one or more heteroatoms and/or aromatic rings, e.g. benzene or pyridine, which rings are optionally substituted.

[0301] The alkylene groups listed above may be optionally interrupted by one or more heteroatoms and/or aromatic rings, e.g. benzene or pyridine.

[0302] The alkylene groups listed above may be unsubstituted linear aliphatic alkylene groups.

[0303] R and R′

[0304] In one embodiment, R is independently selected from optionally substituted C₁₋₁₂ alkyl, C₃₋₂₀ heterocyclyl and C₅₋₂₀ aryl groups. These groups are each defined in the substituents section below.

[0305] In one embodiment, R is independently optionally substituted C₁₋₁₂ alkyl.

[0306] In one embodiment, R is independently optionally substituted C₃₋₂₀ heterocyclyl.

[0307] In one embodiment, R is independently optionally substituted C₅₋₂₀ aryl.

[0308] In one embodiment, R is independently optionally substituted C₁₋₁₂ alkyl.

[0309] Described above in relation to R² are various embodiments relating to preferred alkyl and aryl groups and the identity and number of optional substituents. The preferences set out for R² as it applies to R are applicable, where appropriate, to all other groups R, for examples where R⁶, R⁷, R⁸ or R⁹ is R.

[0310] The preferences for R apply also to R′.

[0311] In some embodiments of the invention there is provided a compound having a substituent group —NRR′. In one embodiment, R and R′ together with the nitrogen atom to which they are attached form an optionally substituted 4-, 5-, 6- or 7-membered heterocyclic ring. The ring may contain a further heteroatom, for example N, O or S.

[0312] In one embodiment, the heterocyclic ring is itself substituted with a group R. Where a further N heteroatom is present, the substituent may be on the N heteroatom.

[0313] In addition to the aforementioned PBDs certain dimeric PBDs have been shown to be particularly active and may be used in conjunction with the instant invention. To this end antibody drug conjugates (i.e., ADCs 1-6 as disclosed herein) of the instant invention may comprise a PBD compound as set forth immediately below as PBD 1-5. The synthesis of each of PBD 1-5 as a component of drug-linker compounds is presented in great detail in WO 2014/130879 which is hereby incorporated by reference as to such synthesis. In view of WO 2014/130879 cytotoxic compounds that may comprise selected warheads of the ADCs of the present invention could readily be generated and employed as set forth herein. Thus selected PBD compounds that may be released from the disclosed ADCs upon cleavage of a linker are set forth immediately below:

[chemical structure]

[0314] It will be appreciated that each of the aforementioned dimeric PBD warheads would be preferably be released upon internalization by the target cell and destruction of the linker. As described in more detail below, preferable linkers will comprise cleavable linkers incorporating a self-immolation moiety that allows release of the active PBD warhead without retention of any part of the linker. Upon release the PBD warhead will then bind and cross-link with the target cell's DNA. Such binding apparently blocks division of the target cancer cell without distorting its DNA helix, thus potentially avoiding the common phenomenon of emergent drug resistance.

[0315] Delivery and release of such compounds at the tumor site(s) may prove clinically effective in treating or managing proliferative disorders in accordance with the instant disclosure. With regard to the compounds it will be appreciated that each of the disclosed PBDs have two sp² centers in each C-ring, which may allow for stronger binding in the minor groove of DNA (and hence greater toxicity), than for compounds with only one sp² center in each C-ring. Thus, when used in DLL3 ADCs as set forth herein the disclosed PBDs may prove to be particularly effective for the treatment of proliferative disorders.

[0316] The foregoing provides exemplary PBD compounds that are compatible with the instant invention and is in no way meant to be limiting as to other PBDs that may be successfully incorporated in anti-DLL3 conjugates according to the teachings herein. Rather, any PBD that may be conjugated to an antibody as described herein and set forth in the Examples below is compatible with the disclosed conjugates and expressly within the metes and bounds of the invention.

[0317] In addition to the aforementioned agents the antibodies of the present invention may also be conjugated to biological response modifiers. For example, in some embodiments the drug moiety can be a polypeptide possessing a desired biological activity. Such proteins may include, for example, a toxin such as abrin, ricin A, Onconase (or another cytotoxic RNase), pseudomonas exotoxin, cholera toxin, diphtheria toxin; an apoptotic agent such as tumor necrosis factor e.g. TNF-α or TNF-β, α-interferon, β-interferon, nerve growth factor, platelet derived growth factor, tissue plasminogen activator, AIM I (WO 97/33899), AIM II (WO 97/34911), Fas Ligand (Takahashi et al., 1994, PMID: 7826947), and VEGI (WO 99/23105), a thrombotic agent, an anti-angiogenic agent, e.g., angiostatin or endostatin, a lymphokine, for example, interleukin-1 (IL-1), interleukin-2 (IL-2), interleukin-6 (IL-6), granulocyte macrophage colony stimulating factor (GM-CSF), and granulocyte colony stimulating factor (G-CSF), or a growth factor e.g., growth hormone (GH).

[0318] 2. Diagnostic or Detection Agents

[0319] In other embodiments, the antibodies of the invention, or fragments or derivatives thereof, are conjugated to a diagnostic or detectable agent, marker or reporter which may be, for example, a biological molecule (e.g., a peptide or nucleotide), a small molecule, fluorophore, or radioisotope. Labeled antibodies can be useful for monitoring the development or progression of a hyperproliferative disorder or as part of a clinical testing procedure to determine the efficacy of a particular therapy including the disclosed antibodies (i.e. theragnostics) or to determine a future course of treatment. Such markers or reporters may also be useful in purifying the selected antibody, for use in antibody analytics (e.g., epitope binding or antibody binning), separating or isolating tumorigenic cells or in preclinical procedures or toxicology studies.

[0320] Such diagnosis, analysis and/or detection can be accomplished by coupling the antibody to detectable substances including, but not limited to, various enzymes comprising for example horseradish peroxidase, alkaline phosphatase, beta-galactosidase, or acetylcholinesterase; prosthetic groups, such as but not limited to streptavidinlbiotin and avidin/biotin; fluorescent materials, such as but not limited to, umbelliferone, fluorescein, fluorescein isothiocynate, rhodamine, dichlorotriazinylamine fluorescein, dansyl chloride or phycoerythrin; luminescent materials, such as but not limited to, luminol; bioluminescent materials, such as but not limited to, luciferase, luciferin, and aequorin; radioactive materials, such as but not limited to, iodine (¹³¹I, ¹²⁵I, ¹²³I, ¹²¹I), carbon (¹⁴C), sulfur (³⁵S), tritium (³H), indium (¹¹⁵In, ¹¹³In, ¹¹²In, ¹¹¹In), and technetium (⁹⁹Tc), thallium (²⁰¹Ti), gallium (⁶⁸Ga, ⁶⁷Ga), palladium (¹⁰³Pd), molybdenum (⁹⁹Mo), xenon (¹³³Xe), fluorine (¹⁸F), ¹⁵³Sm, ¹⁷⁷Lu, ¹⁵⁹Gd, ¹⁴⁹Pm, ¹⁴⁰La, ¹⁷⁵Yb, ¹⁶⁶Ho, ⁹⁰Y, ⁴⁷Sc, ¹⁸⁶Re, ¹⁸⁸Re, ¹⁴²Pr, ¹⁰⁵Rh, ⁹⁷Ru, ⁶⁸Ge, ⁵⁷Co, ⁶⁵Zn, ⁸⁵Sr, ³²P, ⁸⁹Zr, ¹⁵³Gd, ¹⁶⁹Yb, ⁵¹Cr, ⁵⁴Mn, ⁷⁵Se, ¹¹³Sn, and ¹¹⁷Tin; positron emitting metals using various positron emission tomographies, non-radioactive paramagnetic metal ions, and molecules that are radiolabeled or conjugated to specific radioisotopes. In such embodiments appropriate detection methodology is well known in the art and readily available from numerous commercial sources.

[0321] In other embodiments the antibodies or fragments thereof can be fused or conjugated to marker sequences or compounds, such as a peptide or fluorophore to facilitate purification or diagnostic or analytic procedures such as immunohistochemistry, bio-layer interferometry, surface plasmon resonance, flow cytometry, competitive ELISA, FACs, etc. In some embodiments, the marker comprises a histidine tag such as that provided by the pQE vector (Qiagen), among others, many of which are commercially available. Other peptide tags useful for purification include, but are not limited to, the hemagglutinin “HA” tag, which corresponds to an epitope derived from the influenza hemagglutinin protein (Wilson et al., 1984, Cell 37:767) and the “flag” tag (U.S. Pat. No. 4,703,004).

[0322] 3. Biocompatible Modifiers

[0323] In selected embodiments the antibodies of the invention may be conjugated with biocompatible modifiers that may be used to adjust, alter, improve or moderate antibody characteristics as desired. For example, antibodies or fusion constructs with increased in vivo half-lives can be generated by attaching relatively high molecular weight polymer molecules such as commercially available polyethylene glycol (PEG) or similar biocompatible polymers. Those skilled in the art will appreciate that PEG may be obtained in many different molecular weights and molecular configurations that can be selected to impart specific properties to the antibody (e.g. the half-life may be tailored). PEG can be attached to antibodies or antibody fragments or derivatives with or without a multifunctional linker either through conjugation of the PEG to the N- or C-terminus of said antibodies or antibody fragments or via epsilon-amino groups present on lysine residues. Linear or branched polymer derivatization that results in minimal loss of biological activity may be used. The degree of conjugation can be closely monitored by SDS-PAGE and mass spectrometry to ensure optimal conjugation of PEG molecules to antibody molecules. Unreacted PEG can be separated from antibody-PEG conjugates by, e.g., size exclusion or ion-exchange chromatography. In a similar manner, the disclosed antibodies can be conjugated to albumin in order to make the antibody or antibody fragment more stable in vivo or have a longer half-life in vivo. The techniques are well known in the art, see e.g., WO 93/15199, WO 93/15200, and WO 01/77137; and EP 0 413, 622. Other biocompatible conjugates are evident to those of ordinary skill and may readily be identified in accordance with the teachings herein.

[0324] B. Linker Compounds

[0325] Numerous linker compounds can be used to conjugate the antibodies of the invention to the relevant warhead. The linkers merely need to covalently bind with the reactive residue on the antibody (preferably a cysteine or lysine) and the selected drug compound. Accordingly, any linker that reacts with the selected antibody residue and may be used to provide the relatively stable conjugates (site-specific or otherwise) of the instant invention is compatible with the teachings herein.

[0326] Compatible linkers can advantageously bind to reduced cysteines and lysines, which are nucleophilic. Conjugation reactions involving reduced cysteines and lysines include, but are not limited to, thiol-maleimide, thiol-halogeno (acyl halide), thiol-ene, thiol-yne, thiol-vinylsulf one, thiol-bisulfone, thiol-thiosulfonate, thiol-pyridyl disulfide and thiol-parafluoro reactions. As further discussed herein, thiol-maleimide bioconjugation is one of the most widely used approaches due to its fast reaction rates and mild conjugation conditions. One issue with this approach is the possibility of the retro-Michael reaction and loss or transfer of the maleimido-linked payload from the antibody to other proteins in the plasma, such as, for example, human serum albumin. However, in some embodiments the use of selective reduction and site-specific antibodies as set forth herein may be used to stabilize the conjugate and reduce this undesired transfer. Thiol-acyl halide reactions provide bioconjugates that cannot undergo retro-Michael reaction and therefore are more stable. However, the thiol-halide reactions in general have slower reaction rates compared to maleimide-based conjugations and are thus not as efficient in providing undesired drug to antibody ratios. Thiol-pyridyl disulfide reaction is another popular bioconjugation route. The pyridyl disulfide undergoes fast exchange with free thiol resulting in the mixed disulfide and release of pyridine-2-thione. Mixed disulfides can be cleaved in the reductive cell environment releasing the payload. Other approaches gaining more attention in bioconjugation are thiol-vinylsulf one and thiol-bisulfone reactions, each of which are compatible with the teachings herein and expressly included within the scope of the invention.

[0327] In some embodiments compatible linkers will confer stability on the ADCs in the extracellular environment, prevent aggregation of the ADC molecules and keep the ADC freely soluble in aqueous media and in a monomeric state. Before transport or delivery into a cell, the ADC is preferably stable and remains intact, i.e. the antibody remains linked to the drug moiety. While the linkers are stable outside the target cell they are designed to be cleaved or degraded at some efficacious rate inside the cell. Accordingly an effective linker will: (i) maintain the specific binding properties of the antibody; (ii) allow intracellular delivery of the conjugate or drug moiety; (iii) remain stable and intact, i.e. not cleaved or degraded, until the conjugate has been delivered or transported to its targeted site; and (iv) maintain a cytotoxic, cell-killing effect or a cytostatic effect of the drug moiety (including, in some cases, any bystander effects). The stability of the ADC may be measured by standard analytical techniques such as HPLC/UPLC, mass spectroscopy, HPLC, and the separation/analysis techniques LC/MS and LC/MS/MS. As set forth above covalent attachment of the antibody and the drug moiety requires the linker to have two reactive functional groups, i.e. bivalency in a reactive sense. Bivalent linker reagents which are useful to attach two or more functional or biologically active moieties, such as MMAE and antibodies are known, and methods have been described to provide their resulting conjugates.

[0328] Linkers compatible with the present invention may broadly be classified as cleavable and non-cleavable linkers. Cleavable linkers, which may include acid-labile linkers (e.g., oximes and hydrozones), protease cleavable linkers and disulfide linkers, are internalized into the target cell and are cleaved in the endosomal-lysosomal pathway inside the cell. Release and activation of the cytotoxin relies on endosome/lysosome acidic compartments that facilitate cleavage of acid-labile chemical linkages such as hydrazone or oxime. If a lysosomal-specific protease cleavage site is engineered into the linker the cytotoxins will be released in proximity to their intracellular targets. Alternatively, linkers containing mixed disulfides provide an approach by which cytotoxic payloads are released intracellularly as they are selectively cleaved in the reducing environment of the cell, but not in the oxygen-rich environment in the bloodstream. By way of contrast, compatible non-cleavable linkers containing amide linked polyethyleneglycol or alkyl spacers liberate toxic payloads during lysosomal degradation of the ADC within the target cell. In some respects the selection of linker will depend on the particular drug used in the conjugate, the particular indication and the antibody target.

[0329] Accordingly, certain embodiments of the invention comprise a linker that is cleavable by a cleaving agent that is present in the intracellular environment (e.g., within a lysosome or endosome or caveolae). The linker can be, for example, a peptidyl linker that is cleaved by an intracellular peptidase or protease enzyme, including, but not limited to, a lysosomal or endosomal protease. In some embodiments, the peptidyl linker is at least two amino acids long or at least three amino acids long. Cleaving agents can include Cathepsins B and D and plasmin, each of which is known to hydrolyze dipeptide drug derivatives resulting in the release of active drug inside target cells. Exemplary peptidyl linkers that are cleavable by the thiol-dependent protease Cathepsin-B are peptides comprising Phe-Leu since cathepsin-B has been found to be highly expressed in cancerous tissue. Other examples of such linkers are described, for example, in U.S. Pat. No. 6,214,345. In specific embodiments, the peptidyl linker cleavable by an intracellular protease is a Val-Cit linker, a Val-Ala linker or a Phe-Lys linker. One advantage of using intracellular proteolytic release of the therapeutic agent is that the agent is typically attenuated when conjugated and the serum stabilities of the conjugates are relatively high.

[0330] In other embodiments, the cleavable linker is pH-sensitive. Typically, the pH-sensitive linker will be hydrolyzable under acidic conditions. For example, an acid-labile linker that is hydrolyzable in the lysosome (e.g., a hydrazone, oxime, semicarbazone, thiosemicarbazone, cis-aconitic amide, orthoester, acetal, ketal, or the like) can be used (See, e.g., U.S. Pat. Nos. 5,122,368; 5,824,805; 5,622,929). Such linkers are relatively stable under neutral pH conditions, such as those in the blood, but are unstable (e.g., cleavable) at below pH 5.5 or 5.0 which is the approximate pH of the lysosome.

[0331] In yet other embodiments, the linker is cleavable under reducing conditions (e.g., a disulfide linker). A variety of disulfide linkers are known in the art, including, for example, those that can be formed using SATA (N-succinimidyl-S-acetylthioacetate), SPDP (N-succinimidyl-3-(2-pyridyldithio)propionate), SPDB (N-succinimidyl-3-(2-pyridyldithio) butyrate) and SMPT (N-succinimidyl-oxycarbonyl-alpha-methyl-alpha-(2-pyridyl-dithio)toluene). In yet other specific embodiments, the linker is a malonate linker (Johnson et al., 1995, Anticancer Res. 15:1387-93), a maleimidobenzoyl linker (Lau et al., 1995, Bioorg-Med-Chem. 3(10):1299-1304), or a 3′-N-amide analog (Lau et al., 1995, Bioorg-Med-Chem. 3(10):1305-12).

[0332] In selected aspects the selected linker will comprise a compound of the formula:

[chemical structure]

[0333] wherein the asterisk indicates the point of attachment to the drug, CBA (i.e. cell binding agent) comprises the anti-DLL3 antibody, L¹ comprises a linker and optionally a cleavable linker, A is a connecting group (optionally comprising a spacer) connecting L¹ to a reactive residue on the antibody, L² is preferably a covalent bond and U, which may or may not be present, can comprise all or part of a self-immolative unit that facilitates a clean separation of the linker from the warhead at the tumor site.

[0334] In some embodiments (such as those set forth in U.S.P.N. 2011/0256157) compatible linkers may comprise:

[chemical structure]

[0335] where the asterisk indicates the point of attachment to the drug, CBA (i.e. cell binding agent) comprises an anti-DLL3 antibody, L¹ comprises a linker and optionally a cleavable linker, A is a connecting group (optionally comprising a spacer) connecting L¹ to a reactive residue on the antibody and L² is a covalent bond or together with —OC(═O)— forms a self-immolative moiety.

[0336] It will be appreciated that the nature of L¹ and L², where present, can vary widely. These groups are chosen on the basis of their cleavage characteristics, which may be dictated by the conditions at the site to which the conjugate is delivered. Those linkers that are cleaved by the action of enzymes are preferred, although linkers that are cleavable by changes in pH (e.g. acid or base labile), temperature or upon irradiation (e.g. photolabile) may also be used. Linkers that are cleavable under reducing or oxidizing conditions may also find use in the present invention.

[0337] In certain embodiments L¹ may comprise a contiguous sequence of amino acids. The amino acid sequence may be the target substrate for enzymatic cleavage, thereby allowing release of the drug.

[0338] In one embodiment, L¹ is cleavable by the action of an enzyme. In one embodiment, the enzyme is an esterase or a peptidase.

[0339] In another embodiment L¹ is as a Cathepsin labile linker.

[0340] In one embodiment, L¹ comprises a dipeptide. The dipeptide may be represented as —NH—X₁—X₂—CO—, where —NH— and —CO— represent the N- and C-terminals of the amino acid groups X₁ and X₂ respectively. The amino acids in the dipeptide may be any combination of natural amino acids. Where the linker is a Cathepsin labile linker, the dipeptide may be the site of action for Cathepsin-mediated cleavage.

[0341] Additionally, for those amino acids groups having carboxyl or amino side chain functionality, for example Glu and Lys respectively, CO and NH may represent that side chain functionality.

[0342] In one embodiment, the group —X₁—X₂— in dipeptide, —NH—X₁—X₂—CO—, is selected from: -Phe-Lys-, -Val-Ala-, -Val-Lys-, -Ala-Lys-, -Val-Cit-, -Phe-Cit-, -Leu-Cit-, -Ile-Cit-, -Phe-Arg- and -Trp-Cit- where Cit is citrulline.

[0343] Preferably, the group —X₁—X₂— in dipeptide, —NH—X₁—X₂—CO—, is selected from: -Phe-Lys-, -Val-Ala-, -Val-Lys-, -Ala-Lys-, and -Val-Cit-.

[0344] Most preferably, the group —X₁—X₂— in dipeptide, —NH—X₁—X₂—CO—, is -Phe-Lys- or -Val-Ala- or Val-Cit. In certain selected embodiments the dipeptide will comprise -Val-Ala-.

[0345] In one embodiment, L² is present and together with —C(═O)O— forms a self-immolative linker.

[0346] In one embodiment, L² is a substrate for enzymatic activity, thereby allowing release of the warhead.

[0347] In one embodiment, where L¹ is cleavable by the action of an enzyme and L² is present, the enzyme cleaves the bond between L¹ and L².

[0348] L¹ and L², where present, may be connected by a bond selected from: —C(═O)NH—, —C(═O)O—, —NHC(═O)—, —OC(═O)—, —OC(═O)O—, —NHC(═O)O—, —OC(═O)NH—, and —NHC(═O)NH—.

[0349] An amino group of L¹ that connects to L² may be the N-terminus of an amino acid or may be derived from an amino group of an amino acid side chain, for example a lysine amino acid side chain.

[0350] A carboxyl group of L¹ that connects to L² may be the C-terminus of an amino acid or may be derived from a carboxyl group of an amino acid side chain, for example a glutamic acid amino acid side chain.

[0351] A hydroxyl group of L¹ that connects to L² may be derived from a hydroxyl group of an amino acid side chain, for example a serine amino acid side chain.

[0352] The term “amino acid side chain” includes those groups found in: (i) naturally occurring amino acids such as alanine, arginine, asparagine, aspartic acid, cysteine, glutamine, glutamic acid, glycine, histidine, isoleucine, leucine, lysine, methionine, phenylalanine, proline, serine, threonine, tryptophan, tyrosine, and valine; (ii) minor amino acids such as ornithine and citrulline; (iii) unnatural amino acids, beta-amino acids, synthetic analogs and derivatives of naturally occurring amino acids; and (iv) all enantiomers, diastereomers, isomerically enriched, isotopically labelled (e.g. ²H, ³H, ¹⁴C, ¹⁵N), protected forms, and racemic mixtures thereof.

[0353] In one embodiment, —C(═O)O— and L² together form the group:

[chemical structure]

[0354] where the asterisk indicates the point of attachment to the drug or cytotoxic agent position, the wavy line indicates the point of attachment to the linker L¹, Y is —N(H)—, —O—, —C(═O)N(H)— or —C(═O)O—, and n is 0 to 3. The phenylene ring is optionally substituted with one, two or three substituents. In one embodiment, the phenylene group is optionally substituted with halo, NO₂, alkyl or hydroxyalkyl.

[0355] In one embodiment, Y is NH.

[0356] In one embodiment, n is 0 or 1. Preferably, n is 0.

[0357] Where Y is NH and n is 0, the self-immolative linker may be referred to as a p-aminobenzylcarbonyl linker (PABC).

[0358] In other embodiments the linker may include a self-immolative linker and the dipeptide together form the group —NH-Val-Cit-CO—NH-PABC-. In other selected embodiments the linker may comprise the group —NH-Val-Ala-CO—NH-PABC-, which is illustrated below:

[chemical structure]

[0359] where the asterisk indicates the point of attachment to the selected cytotoxic moiety, and the wavy line indicates the point of attachment to the remaining portion of the linker (e.g., the spacer-antibody binding segments) which may be conjugated to the antibody. Upon enzymatic cleavage of the dipeptide, the self-immolative linker will allow for clean release of the protected compound (i.e., the cytotoxin) when a remote site is activated, proceeding along the lines shown below:

[chemical structure]

[0360] where the asterisk indicates the point of attachment to the selected cytotoxic moiety and where L* is the activated form of the remaining portion of the linker comprising the now cleaved peptidyl unit. The clean release of the warhead ensures it will maintain the desired toxic activity.

[0361] In one embodiment, A is a covalent bond. Thus, L¹ and the antibody are directly connected. For example, where L¹ comprises a contiguous amino acid sequence, the N-terminus of the sequence may connect directly to the antibody residue.

[0362] In another embodiment, A is a spacer group. Thus, L¹ and the antibody are indirectly connected.

[0363] In certain embodiments L¹ and A may be connected by a bond selected from: —C(═O)NH—, —C(═O)O—, —NHC(═O)—, —OC(═O)—, —OC(═O)O—, —NHC(═O)O—, —OC(═O)NH—, and —NHC(═O)NH—.

[0364] As will be discussed in more detail below the drug linkers of the instant invention will preferably be linked to reactive thiol nucleophiles on cysteines, including free cysteines. To this end the cysteines of the antibodies may be made reactive for conjugation with linker reagents by treatment with various reducing agent such as DTT or TCEP or mild reducing agents as set forth herein. In other embodiments the drug linkers of the instant invention will preferably be linked to a lysine.

[0365] Preferably, the linker contains an electrophilic functional group for reaction with a nucleophilic functional group on the antibody. Nucleophilic groups on antibodies include, but are not limited to: (i) N-terminal amine groups, (ii) side chain amine groups, e.g. lysine, (iii) side chain thiol groups, e.g. cysteine, and (iv) sugar hydroxyl or amino groups where the antibody is glycosylated. Amine, thiol, and hydroxyl groups are nucleophilic and capable of reacting to form covalent bonds with electrophilic groups on linker moieties and linker reagents including: (i) maleimide groups (ii) activated disulfides, (iii) active esters such as NHS (N-hydroxysuccinimide) esters, HOBt (N-hydroxybenzotriazole) esters, haloformates, and acid halides; (iv) alkyl and benzyl halides such as haloacetamides; and (v) aldehydes, ketones and carboxyl groups.

[0366] Exemplary functional groups compatible with the invention are illustrated immediately below:

[chemical structure]

[0367] In some embodiments the connection between a cysteine (including a free cysteine of a site-specific antibody) and the drug-linker moiety is through a thiol residue and a terminal maleimide group of present on the linker. In such embodiments, the connection between the antibody and the drug-linker may be:

[chemical structure]

[0368] where the asterisk indicates the point of attachment to the remaining portion of drug-linker and the wavy line indicates the point of attachment to the remaining portion of the antibody. In this embodiment, the S atom is preferably derived from a site-specific free cysteine.

[0369] With regard to other compatible linkers the binding moiety may comprise a terminal iodoacetamide that may be reacted with activated residues on the antibody to provide the desired conjugate. In any event one skilled in the art could readily conjugate each of the disclosed drug-linker compounds with a compatible anti-DLL3 antibody (including site-specific antibodies) in view of the instant disclosure.

[0370] In accordance with the instant disclosure the invention provides methods of making compatible antibody drug conjugates comprising conjugating an anti-DLL3 antibody with a drug-linker compound selected from the group consisting of:

[chemical structure]

[chemical structure]

[0371] For the purposes of then instant application DL will be used as an abbreviation for “drug-linker” and will comprise drug linkers 1-6 (i.e., DL1, DL2, DL3, DL4 DL5, and DL6) as set forth above. Note that DL1 and DL6 comprise the same warhead and same dipeptide subunit but differ in the connecting group spacer. Accordingly, upon cleavage of the linker both DL1 and DL6 will release PBD1.

[0372] It will be appreciated that the linker appended terminal maleimido moiety (DL1-DL4 and DL6) or iodoacetamide moiety (DL5) may be conjugated to free sulfhydryl(s) on the selected DLL3 antibody using art-recognized techniques. Synthetic routes for the aforementioned compounds are set forth in WO2014/130879 which is incorporated herein by reference while specific methods of conjugating such PBDs are set forth in the Examples below.

[0373] Thus, in selected aspects the present invention relates to DLL3 antibodies conjugated to the disclosed pyrrolobenzodiazepines to provide DLL3 immunoconjugates substantially set forth in ADCs 1-6 immediately below. Accordingly, in certain aspects the invention is directed to an antibody drug conjugate selected from the group consisting of

[chemical structure]

[chemical structure]

[0374] wherein Ab comprises an anti-DLL3 antibody or immunoreactive fragment thereof. Note that ADC1, when it comprises the hSC16.56 antibody (SEQ ID NOS: 7 and 8), may also be referred to as SC16LD6.5 or hSC16.56PBD1 (which may comprise DL1 or DL6) or hSC16.56DL1 or rovalpituzumab tesirine (Rova-T) for the purposes of the instant disclosure. Similarly, ADC6, when it comprises the hSC16.56ss1 antibody (SEQ ID NOS: 8 and 9), may be referred to hSC16.56ss1PBD1 (which may comprise DL1 or DL6) or hSC16.56ss1 DL6 for the purposes of the instant disclosure.

[0375] C. Conjugation

[0376] It will be appreciated that a number of well-known different reactions may be used to attach the drug moiety and/or linker to the selected antibody. For example, various reactions exploiting sulfhydryl groups of cysteines may be employed to conjugate the desired moiety. Some embodiments will comprise conjugation of antibodies comprising one or more free cysteines as discussed in detail below. In other embodiments ADCs of the instant invention may be generated through conjugation of drugs to solvent-exposed amino groups of lysine residues present in the selected antibody. Still other embodiments comprise activation of N-terminal threonine and serine residues which may then be used to attach the disclosed payloads to the antibody. The selected conjugation methodology will preferably be tailored to optimize the number of drugs attached to the antibody and provide a relatively high therapeutic index.

[0377] Various methods are known in the art for conjugating a therapeutic compound to a cysteine residue and will be apparent to the skilled artisan. Under basic conditions the cysteine residues will be deprotonated to generate a thiolate nucleophile which may be reacted with soft electrophiles such as maleimides and iodoacetamides. Generally reagents for such conjugations may react directly with a cysteine thiol to form the conjugated protein or with a linker-drug to form a linker-drug intermediate. In the case of a linker, several routes, employing organic chemistry reactions, conditions, and reagents are known to those skilled in the art, including: (1) reaction of a cysteine group of the protein of the invention with a linker reagent, to form a protein-linker intermediate, via a covalent bond, followed by reaction with an activated compound; and (2) reaction of a nucleophilic group of a compound with a linker reagent, to form a drug-linker intermediate, via a covalent bond, followed by reaction with a cysteine group of a protein of the invention. As will be apparent to the skilled artisan from the foregoing, bifunctional (or bivalent) linkers are useful in the present invention. For example, the bifunctional linker may comprise a thiol modification group for covalent linkage to the cysteine residue(s) and at least one attachment moiety (e.g., a second thiol modification moiety) for covalent or non-covalent linkage to the compound.

[0378] Prior to conjugation, antibodies may be made reactive for conjugation with linker reagents by treatment with a reducing agent such as dithiothreitol (DTT) or (tris(2-carboxyethyl)phosphine (TCEP). In other embodiments additional nucleophilic groups can be introduced into antibodies through the reaction of lysines with reagents, including but not limited to, 2-iminothiolane (Traut's reagent), SATA, SATP or SAT(PEG)4, resulting in conversion of an amine into a thiol.

[0379] With regard to such conjugations cysteine thiol or lysine amino groups are nucleophilic and capable of reacting to form covalent bonds with electrophilic groups on linker reagents or compound-linker intermediates or drugs including: (i) active esters such as NHS esters, HOBt esters, haloformates, and acid halides; (ii) alkyl and benzyl halides, such as haloacetamides; (iii) aldehydes, ketones, carboxyl, and maleimide groups; and (iv) disulfides, including pyridyl disulfides, via sulfide exchange. Nucleophilic groups on a compound or linker include, but are not limited to amine, thiol, hydroxyl, hydrazide, oxime, hydrazine, thiosemicarbazone, hydrazine carboxylate, and arylhydrazide groups capable of reacting to form covalent bonds with electrophilic groups on linker moieties and linker reagents.

[0380] Conjugation reagents commonly include maleimide, haloacetyl, iodoacetamide succinimidyl ester, isothiocyanate, sulfonyl chloride, 2,6-dichlorotriazinyl, pentafluorophenyl ester, and phosphoramidite, although other functional groups can also be used. In certain embodiments methods include, for example, the use of maleimides, iodoacetimides or haloacetyl/alkyl halides, aziridne, acryloyl derivatives to react with the thiol of a cysteine to produce a thioether that is reactive with a compound. Disulphide exchange of a free thiol with an activated piridyldisulphide is also useful for producing a conjugate (e.g., use of 5-thio-2-nitrobenzoic (TNB) acid). Preferably, a maleimide is used.

[0381] As indicated above, lysine may also be used as a reactive residue to effect conjugation as set forth herein. The nucleophilic lysine residue is commonly targeted through amine-reactive succinimidylesters. To obtain an optimal number of deprotonated lysine residues, the pH of the aqueous solution must be below the pKa of the lysine ammonium group, which is around 10.5, so the typical pH of the reaction is about 8 and 9. The common reagent for the coupling reaction is NHS-ester which reacts with nucleophilic lysine through a lysine acylation mechanism. Other compatible reagents that undergo similar reactions comprise isocyanates and isothiocyanates, which also may be used in conjunction with the teachings herein to provide ADCs. Once the lysines have been activated, many of the aforementioned linking groups may be used to covalently bind the warhead to the antibody.

[0382] Methods are also known in the art for conjugating a compound to a threonine or serine residue (preferably a N-terminal residue). For example methods have been described in which carbonyl precursors are derived from the 1,2-aminoalcohols of serine or threonine, which can be selectively and rapidly converted to aldehyde form by periodate oxidation. Reaction of the aldehyde with a 1,2-aminothiol of cysteine in a compound to be attached to a protein of the invention forms a stable thiazolidine product. This method is particularly useful for labeling proteins at N-terminal serine or threonine residues.

[0383] In some embodiments reactive thiol groups may be introduced into the selected antibody (or fragment thereof) by introducing one, two, three, four, or more free cysteine residues (e.g., preparing antibodies comprising one or more free non-native cysteine amino acid residues). Such site-specific antibodies or engineered antibodies, allow for conjugate preparations that exhibit enhanced stability and substantial homogeneity due, at least in part, to the provision of engineered free cysteine site(s) and/or the novel conjugation procedures set forth herein. Unlike conventional conjugation methodology that fully or partially reduces each of the intrachain or interchain antibody disulfide bonds to provide conjugation sites (and is fully compatible with the instant invention), the present invention additionally provides for the selective reduction of certain prepared free cysteine sites and direction of the drug-linker to the same.

[0384] In this regard it will be appreciated that the conjugation specificity promoted by the engineered sites and the selective reduction allows for a high percentage of site directed conjugation at the desired positions. Significantly some of these conjugation sites, such as those present in the terminal region of the light chain constant region, are typically difficult to conjugate effectively as they tend to cross-react with other free cysteines. However, through molecular engineering and selective reduction of the resulting free cysteines, efficient conjugation rates may be obtained which considerably reduces unwanted high-DAR contaminants and non-specific toxicity. More generally the engineered constructs and disclosed novel conjugation methods comprising selective reduction provide ADC preparations having improved pharmacokinetics and/or pharmacodynamics and, potentially, an improved therapeutic index.

[0385] In certain embodiments site-specific constructs present free cysteine(s) which, when reduced, comprise thiol groups that are nucleophilic and capable of reacting to form covalent bonds with electrophilic groups on linker moieties such as those disclosed above. As discussed above antibodies of the instant invention may have reducible unpaired interchain or intrachain cysteines or introduced non-native cysteines, i.e. cysteines providing such nucleophilic groups. Thus, in certain embodiments the reaction of free sulfhydryl groups of the reduced free cysteines and the terminal maleimido or haloacetamide groups of the disclosed drug-linkers will provide the desired conjugation. In such cases free cysteines of the antibodies may be made reactive for conjugation with linker reagents by treatment with a reducing agent such as dithiothreitol (DTT) or (tris (2-carboxyethyl)phosphine (TCEP). Each free cysteine will thus present, theoretically, a reactive thiol nucleophile. While such reagents are compatible it will be appreciated that conjugation of site-specific antibodies may be effected using various reactions, conditions and reagents generally known to those skilled in the art.

[0386] In addition it has been found that the free cysteines of engineered antibodies may be selectively reduced to provide enhanced site-directed conjugation and a reduction in unwanted, potentially toxic contaminants. More specifically “stabilizing agents” such as arginine have been found to modulate intra- and inter-molecular interactions in proteins and may be used, in conjunction with selected reducing agents (preferably relatively mild), to selectively reduce the free cysteines and to facilitate site-specific conjugation as set forth herein. As used herein the terms “selective reduction” or “selectively reducing” may be used interchangeably and shall mean the reduction of free cysteine(s) without substantially disrupting native disulfide bonds present in the engineered antibody. In selected embodiments this reduction may be effected solely by certain reducing agents. In other embodiments selective reduction of an engineered construct will comprise the use of stabilization agents in combination with reducing agents (including mild reducing agents). It will be appreciated that the term “selective conjugation” shall mean the conjugation of an engineered antibody that has been selectively reduced, with a cytotoxin as described herein. In this respect the use of such stabilizing agents in combination with selected reducing agents can markedly improve the efficiency of site-specific conjugation as determined by extent of conjugation at selected sites on the heavy and/or light antibody chains and DAR distribution of the preparation. Compatible antibody constructs and selective conjugation techniques and reagents are extensively disclosed in WO2015/031698 which is incorporated herein in its entirety as to such methodology and constructs.

[0387] While not wishing to be bound by any particular theory, such stabilizing agents may act to modulate the electrostatic microenvironment and/or modulate conformational changes at the desired conjugation site, thereby allowing relatively mild reducing agents (which do not materially reduce intact native disulfide bonds) to facilitate conjugation at the desired free cysteine site(s). Such agents (e.g., certain amino acids) are known to form salt bridges (via hydrogen bonding and electrostatic interactions) and can modulate protein-protein interactions in such a way as to impart a stabilizing effect that may cause favorable conformation changes and/or reduce unfavorable protein-protein interactions. Moreover, such agents may act to inhibit the formation of undesired intramolecular (and intermolecular) cysteine-cysteine bonds after reduction thus facilitating the desired conjugation reaction wherein the engineered site-specific cysteine is bound to the drug (preferably via a linker). Since selective reduction conditions do not provide for the significant reduction of intact native disulfide bonds, the subsequent conjugation reaction is naturally driven to the relatively few reactive thiols on the free cysteines (e.g., preferably 2 free thiols per antibody). As previously alluded to, such techniques may be used to considerably reduce levels of non-specific conjugation and corresponding impurities in conjugate preparations fabricated in accordance with the instant disclosure. Consequently these site-specific ADC compositions may exhibit reduced toxicity.

[0388] In selected embodiments stabilizing agents compatible with the present invention will generally comprise compounds with at least one moiety having a basic pKa. In certain embodiments the moiety will comprise a primary amine while in other embodiments the amine moiety will comprise a secondary amine. In still other embodiments the amine moiety will comprise a tertiary amine or a guanidinium group. In other selected embodiments the amine moiety will comprise an amino acid while in other compatible embodiments the amine moiety will comprise an amino acid side chain. In yet other embodiments the amine moiety will comprise a proteinogenic amino acid. In still other embodiments the amine moiety comprises a non-proteinogenic amino acid. In some embodiments, compatible stabilizing agents may comprise arginine, lysine, proline and cysteine. In addition compatible stabilizing agents may include guanidine and nitrogen containing heterocycles with basic pKa.

[0389] In certain embodiments compatible stabilizing agents comprise compounds with at least one amine moiety having a pKa of greater than about 7.5, in other embodiments the subject amine moiety will have a pKa of greater than about 8.0, in yet other embodiments the amine moiety will have a pKa greater than about 8.5 and in still other embodiments the stabilizing agent will comprise an amine moiety having a pKa of greater than about 9.0. Other embodiments will comprise stabilizing agents where the amine moiety will have a pKa of greater than about 9.5 while certain other embodiments will comprise stabilizing agents exhibiting at least one amine moiety having a pKa of greater than about 10.0. In still other embodiments the stabilizing agent will comprise a compound having the amine moiety with a pKa of greater than about 10.5, in other embodiments the stabilizing agent will comprise a compound having a amine moiety with a pKa greater than about 11.0, while in still other embodiments the stabilizing agent will comprise a amine moiety with a pKa greater than about 11.5. In yet other embodiments the stabilizing agent will comprise a compound having an amine moiety with a pKa greater than about 12.0, while in still other embodiments the stabilizing agent will comprise an amine moiety with a pKa greater than about 12.5. Those of skill in the art will understand that relevant pKa's may readily be calculated or determined using standard techniques and used to determine the applicability of using a selected compound as a stabilizing agent.

[0390] The disclosed stabilizing agents are shown to be particularly effective at targeting conjugation to free site-specific cysteines when combined with certain reducing agents. For the purposes of the instant invention, compatible reducing agents may include any compound that produces a reduced free site-specific cysteine for conjugation without significantly disrupting the native disulfide bonds of the engineered antibody. Under such conditions, preferably provided by the combination of selected stabilizing and reducing agents, the activated drug linker is largely limited to binding to the desired free site-specific cysteine site(s). Relatively mild reducing agents or reducing agents used at relatively low concentrations to provide mild conditions are particularly preferred. As used herein the terms “mild reducing agent” or “mild reducing conditions” shall be held to mean any agent or state brought about by a reducing agent (optionally in the presence of stabilizing agents) that provides thiols at the free cysteine site(s) without substantially disrupting native disulfide bonds present in the engineered antibody. That is, mild reducing agents or conditions (preferably in combination with a stabilizing agent) are able to effectively reduce free cysteine(s) (provide a thiol) without significantly disrupting the protein's native disulfide bonds. The desired reducing conditions may be provided by a number of sulfhydryl-based compounds that establish the appropriate environment for selective conjugation. In embodiments mild reducing agents may comprise compounds having one or more free thiols while in some embodiments mild reducing agents will comprise compounds having a single free thiol. Non-limiting examples of reducing agents compatible with the selective reduction techniques of the instant invention comprise glutathione, n-acetyl cysteine, cysteine, 2-aminoethane-1-thiol and 2-hydroxyethane-1-thiol.

[0391] It will be appreciated that selective reduction process set forth above is particularly effective at targeted conjugation to the free cysteine. In this respect the extent of conjugation to the desired target site (defined here as “conjugation efficiency”) in site-specific antibodies may be determined by various art-accepted techniques. The efficiency of the site-specific conjugation of a drug to an antibody may be determined by assessing the percentage of conjugation on the target conjugation site(s) (e.g. free cysteines on the c-terminus of each light chain) relative to all other conjugated sites. In certain embodiments, the method herein provides for efficiently conjugating a drug to an antibody comprising free cysteines. In some embodiments, the conjugation efficiency is at least 5%, at least 10%, at least 15%, at least 20%, at least 25%, at least 30%, at least 35%, at least 40%, at least 45%, at least 50%, at least 55%, at least 60%, at least 70%, at least 75%, at least 80%, at least 85%, at least 90%, at least 95%, at least 98% or more as measured by the percentage of target conjugation relative to all other conjugation sites.

[0392] It will further be appreciated that engineered antibodies capable of conjugation may contain free cysteine residues that comprise sulfhydryl groups that are blocked or capped as the antibody is produced or stored. Such caps include small molecules, proteins, peptides, ions and other materials that interact with the sulfhydryl group and prevent or inhibit conjugate formation. In some cases the unconjugated engineered antibody may comprise free cysteines that bind other free cysteines on the same or different antibodies. As discussed herein such cross-reactivity may lead to various contaminants during the fabrication procedure. In some embodiments, the engineered antibodies may require uncapping prior to a conjugation reaction. In specific embodiments, antibodies herein are uncapped and display a free sulfhydryl group capable of conjugation. In other specific embodiments, antibodies herein are subjected to an uncapping reaction that does not disturb or rearrange the naturally occurring disulfide bonds. It will be appreciated that in most cases the uncapping reactions will occur during the normal reduction reactions (reduction or selective reduction).

[0393] D. DAR Distribution and Purification

[0394] In selected embodiments conjugation and purification methodology compatible with the present invention advantageously provides the ability to generate relatively homogeneous ADC preparations comprising a narrow DAR distribution. In this regard the disclosed constructs (e.g., site specific constructs) and/or selective conjugation provides for homogeneity of the ADC species within a sample in terms of the stoichiometric ratio between the drug and the engineered antibody and with respect to the toxin location. As briefly discussed above the term “drug to antibody ratio” or “DAR” refers to the molar ratio of drug to antibody. In certain embodiments a conjugate preparation may be substantially homogeneous with respect to its DAR distribution, meaning that within the ADC preparation is a predominant species of site-specific ADC with a particular DAR (e.g., a DAR of 2 or 4) that is also uniform with respect to the site of loading (i.e., on the free cysteines). In other certain embodiments of the invention it is possible to achieve the desired homogeneity through the use of site-specific antibodies and/or selective reduction and conjugation. In other embodiments the desired homogeneity may be achieved through the use of site-specific constructs in combination with selective reduction. In yet other embodiments compatible preparations may be further purified using analytical or preparative chromatography techniques to provide the desired homogeneity. In each of these embodiments the homogeneity of the ADC sample can be analyzed using various techniques known in the art including but not limited to mass spectrometry, HPLC (e.g. size exclusion HPLC, RP-HPLC, HIC-HPLC etc.) or capillary electrophoresis.

[0395] With regard to the purification of ADC preparations it will be appreciated that standard pharmaceutical preparative methods may be employed to obtain the desired purity. As discussed herein liquid chromatography methods such as reverse phase (RP) and hydrophobic interaction chromatography (HIC) may separate compounds in the mixture by drug loading value. In some cases, ion-exchange (IEC) or mixed-mode chromatography (MMC) may also be used to isolate species with a specific drug load.

[0396] The disclosed ADCs and preparations thereof may comprise drug and antibody moieties in various stoichiometric molar ratios depending on the configuration of the antibody and, at least in part, on the method used to effect conjugation. In certain embodiments the drug loading per ADC may comprise from 1-20 warheads (i.e., n is 1-20). Other selected embodiments may comprise ADCs with a drug loading of from 1 to 15 warheads. In still other embodiments the ADCs may comprise from 1-12 warheads or, more preferably, from 1-10 warheads. In some embodiments the ADCs will comprise from 1 to 8 warheads.

[0397] While theoretical drug loading may be relatively high, practical limitations such as free cysteine cross reactivity and warhead hydrophobicity tend to limit the generation of homogeneous preparations comprising such DAR due to aggregates and other contaminants. That is, higher drug loading, e.g. >6 or 8, may cause aggregation, insolubility, toxicity, or loss of cellular permeability of certain antibody-drug conjugates depending on the payload. In view of such concerns practical drug loading provided by the instant invention preferably ranges from 1 to 8 drugs per conjugate, i.e. where 1, 2, 3, 4, 5, 6, 7, or 8 drugs are covalently attached to each antibody (e.g., for IgG1, other antibodies may have different loading capacity depending the number of disulfide bonds). Preferably the DAR of compositions of the instant invention will be approximately 2, 4 or 6 and in some embodiments the DAR will comprise approximately 2.

[0398] Despite the relatively high level of homogeneity provided by the instant invention the disclosed compositions actually comprise a mixture of conjugates with a range of drugs compounds (e.g., potentially from 1 to 8 in the case of an IgG1). As such, the disclosed ADC compositions include mixtures of conjugates where most of the constituent antibodies are covalently linked to one or more drug moieties and (despite the relative conjugate specificity provided by engineered constructs and selective reduction) where the drug moieties may be attached to the antibody by various thiol groups. That is, following conjugation ADC compositions of the invention will comprise a mixture of conjugates with different drug loads (e.g., from 1 to 8 drugs per IgG1 antibody) at various concentrations (along with certain reaction contaminants primarily caused by free cysteine cross reactivity). However using selective reduction and post-fabrication purification the conjugate compositions may be driven to the point where they largely contain a single predominant desired ADC species (e.g., with a drug loading of 2) with relatively low levels of other ADC species (e.g., with a drug loading of 1, 4, 6, etc.). The average DAR value represents the weighted average of drug loading for the composition as a whole (i.e., all the ADC species taken together). Due to inherent uncertainty in the quantification methodology employed and the difficulty in completely removing the non-predominant ADC species in a commercial setting, acceptable DAR values or specifications are often presented as an average, a range or distribution (i.e., an average DAR of 2+/−0.5). Preferably compositions comprising a measured average DAR within the range (i.e., 1.5 to 2.5) would be used in a pharmaceutical setting.

[0399] Thus, in some embodiments the present invention will comprise compositions having an average DAR of 1, 2, 3, 4, 5, 6, 7 or 8 each +/−0.5. In other embodiments the present invention will comprise an average DAR of 2, 4, 6 or 8+/−0.5. Finally, in selected embodiments the present invention will comprise an average DAR of 2+/−0.5 or 4+/−0.5. It will be appreciated that the range or deviation may be less than 0.4 in some embodiments. Thus, in other embodiments the compositions will comprise an average DAR of 1, 2, 3, 4, 5, 6, 7 or 8 each +/−0.3, an average DAR of 2, 4, 6 or 8+/−0.3, even more preferably an average DAR of 2 or 4+/−0.3 or even an average DAR of 2+/−0.3. In other embodiments IgG1 conjugate compositions will preferably comprise a composition with an average DAR of 1, 2, 3, 4, 5, 6, 7 or 8 each +/−0.4 and relatively low levels (i.e., less than 30%) of non-predominant ADC species. In other embodiments the ADC composition will comprise an average DAR of 2, 4, 6 or 8 each +/−0.4 with relatively low levels (<30%) of non-predominant ADC species. In some embodiments the ADC composition will comprise an average DAR of 2+/−0.4 with relatively low levels (<30%) of non-predominant ADC species. In yet other embodiments the predominant ADC species (e.g., DAR of 2 or DAR of 4) will be present at a concentration of greater than 65%, at a concentration of greater than 70%, at a concentration of greater than 75%, at a concentration of greater that 80%, at a concentration of greater than 85%, at a concentration of greater than 90%, at a concentration of greater than 93%, at a concentration of greater than 95% or even at a concentration of greater than 97% when measured against other DAR species.

[0400] Those of skill in the art will appreciate that the distribution of drugs per antibody in preparations of ADC from conjugation reactions may be characterized by conventional means such as UV-Vis spectrophotometry, reverse phase HPLC, HIC, mass spectroscopy, ELISA, and electrophoresis. By way of example the quantitative distribution of ADC in terms of drugs per antibody may also be determined using a combination of HIC and RP chromatography. Similarly the averaged value of the drugs per antibody in a particular preparation of ADC may be determined using ELISA although the distribution of drug per antibody value is not readily discernible due to antibody-antigen binding and detection limitations. Also, ELISA assays do not provide information as to where the drug moieties are attached on the antibody. However, as alluded to above such data is readily obtainable using various chromatography and electrophoresis techniques well known in the art.

### VI. DIAGNOSTICS AND SCREENING

[0401] A. Diagnostics

[0402] The invention provides in vitro and in vivo methods for detecting, diagnosing or monitoring proliferative disorders and methods of screening cells from a patient to identify tumor cells including tumorigenic cells. Such methods include identifying an individual having cancer for treatment or monitoring progression of a cancer, comprising contacting the patient or a sample obtained from a patient (either in vivo or in vitro) with a detection agent (e.g., an antibody or nucleic acid probe) capable of specifically recognizing and associating with a DLL3 determinant and detecting the presence or absence, or level of association of the detection agent in the sample. In selected embodiments the detection agent will comprise an antibody associated with a detectable label or reporter molecule as described herein. In certain other embodiments the DLL3 antibody will be administered and detected using a secondary labelled antibody (e.g., an anti-murine antibody). In yet other embodiments (e.g., In situ hybridization or ISH) a nucleic acid probe that reacts with a genomic DLL3 determinant will be used in the detection, diagnosis or monitoring of the proliferative disorder.

[0403] More generally the presence and/or levels of DLL3 determinants may be measured using any of a number of techniques available to the person of ordinary skill in the art for protein or nucleic acid analysis, e.g., direct physical measurements (e.g., mass spectrometry), binding assays (e.g., immunoassays, agglutination assays, and immunochromatographic assays), Polymerase Chain Reaction (PCR, RT-PCR; RT-qPCR) technology, branched oligonucleotide technology, Northern blot technology, oligonucleotide hybridization technology and in situ hybridization technology. The method may also comprise measuring a signal that results from a chemical reaction, e.g., a change in optical absorbance, a change in fluorescence, the generation of chemiluminescence or electrochemiluminescence, a change in reflectivity, refractive index or light scattering, the accumulation or release of detectable labels from the surface, the oxidation or reduction or redox species, an electrical current or potential, changes in magnetic fields, etc. Suitable detection techniques may detect binding events by measuring the participation of labeled binding reagents through the measurement of the labels via their photoluminescence (e.g., via measurement of fluorescence, time-resolved fluorescence, evanescent wave fluorescence, up-converting phosphors, multi-photon fluorescence, etc.), chemiluminescence, electrochemiluminescence, light scattering, optical absorbance, radioactivity, magnetic fields, enzymatic activity (e.g., by measuring enzyme activity through enzymatic reactions that cause changes in optical absorbance or fluorescence or cause the emission of chemiluminescence). Alternatively, detection techniques may be used that do not require the use of labels, e.g., techniques based on measuring mass (e.g., surface acoustic wave measurements), refractive index (e.g., surface plasmon resonance measurements), or the inherent luminescence of an analyte.

[0404] In some embodiments, the association of the detection agent with particular cells or cellular components in the sample indicates that the sample may contain tumorigenic cells, thereby denoting that the individual having cancer may be effectively treated with an antibody or ADC as described herein.

[0405] In certain preferred embodiments the assays may comprise immunohistochemistry (IHC) assays or variants thereof (e.g., fluorescent, chromogenic, standard ABC, standard LSAB, etc.), immunocytochemistry or variants thereof (e.g., direct, indirect, fluorescent, chromogenic, etc.) or In situ hybridization (ISH) or variants thereof (e.g., chromogenic in situ hybridization (CISH) or fluorescence in situ hybridization (DNA-FISH or RNA-FISH]))

[0406] In this regard certain aspects of the instant invention comprise the use of labeled DLL3 antibodies for immunohistochemistry (IHC). In other embodiments the DLL3 antibody will be detected using a secondary labelled antibody. More particularly DLL3 IHC may be used as a diagnostic tool to aid in the diagnosis of various proliferative disorders and to monitor the potential response to treatments including DLL3 antibody therapy. As discussed herein and shown in the Examples below compatible diagnostic assays may be performed on tissues that have been chemically fixed (compatible techniques include, but are not limited to: formaldehyde, gluteraldehyde, osmium tetroxide, potassium dichromate, acetic acid, alcohols, zinc salts, mercuric chloride, chromium tetroxide and picric acid) and embedded (compatible methods include but are not limited to: glycol methacrylate, paraffin and resins) or preserved via freezing. Such assays can be used to guide treatment decisions and determine dosing regimens and timing.

[0407] As shown in the Examples below immunohistochemistry techniques may be used to derive an H-score as known in the art. Such H-scores may be used to indicate which patients may be amenable to treatment with the compositions of the instant invention. Based on the Examples below H-scores of approximately 90, approximately 100, approximately 110, approximately 120, approximately 130, approximately 140, approximately 150, approximately 160, approximately 170, approximately 180, approximately 190 or approximately 200 or above on a 300 point scale may be used in selected embodiments to indicate which patients may respond favorably to the treatment methods of the instant invention. Accordingly in one embodiment a patient to be treated with the DLL3 ADCs of the instant invention will have an H-score of at least 90 (i.e., the tumor is DLL3+) on a 300 point scale. In other embodiments a patient to be treated with the DLL3 ADCs of the instant invention will have an H-score of at least 120. In yet other embodiments a patient to be treated with the DLL3 ADCs of the instant invention will have an H-score of at least 180. For the purposes of the instant disclosure any tumor exhibiting an H-score of 90 or above on a 300 point scale will be considered a DLL3+ tumor and subject to treatment with the disclosed antibodies or ADCs.

[0408] In other embodiments patient selection may be based on the more simple measurement of percent of positively stained DLL3 cells in a tumor sample. In this regard patients exhibiting a certain percentage of positively stained cells in an IHC sample when interrogated with an anti-DLL3 antibody would be considered DLL3+ and would be selected for treatment in accordance with the teachings herein. In such embodiments tumor samples exhibiting greater than 10%, greater than 20%, greater than 30%, greater than 40% or greater than 50% positive cell staining may be classified as DLL3+. In other embodiments tumor samples exhibiting greater than 60%, greater than 70%, greater than 80%, greater than 90% or greater than 95% positive cell staining may be classified as DLL3+. In certain preferred aspects the DLL3+ tumor will express DLL3 in 50% of the constituent cells. In each of the forgoing embodiments patients suffering from DLL3+ positive tumors may be treated with the disclosed compositions as set forth herein.

[0409] Other particularly compatible aspects of the invention involve the use of in situ hybridization to detect or monitor DLL3 determinants. In situ hybridization technology or ISH is well known to those of skill in the art. Briefly, cells are fixed and detectable probes which contain a specific nucleotide sequence are added to the fixed cells. If the cells contain complementary nucleotide sequences, the probes, which can be detected, will hybridize to them. Using the sequence information set forth herein, probes can be designed to identify cells that express genotypic DLL3 determinants. Probes preferably hybridize to a nucleotide sequence that corresponds to such determinants. Hybridization conditions can be routinely optimized to minimize background signal by non-fully complementary hybridization though preferably the probes are preferably fully complementary to the selected DLL3 determinant. In selected embodiments the probes are labeled with fluorescent dye attached to the probes that is readily detectable by standard fluorescent methodology.

[0410] Compatible in vivo theragnostics or diagnostic assays may comprise art-recognized imaging or monitoring techniques such as magnetic resonance imaging, computerized tomography (e.g. CAT scan), positron tomography (e.g., PET scan) radiography, ultrasound, etc., as would be known by those skilled in the art.

[0411] In certain embodiments the antibodies of the instant invention may be used to detect and quantify levels of a particular determinant (e.g., DLL3 protein) in a patient sample (e.g., plasma or blood) which may, in turn, be used to detect, diagnose or monitor proliferative disorders that are associated with the relevant determinant. In related embodiments the antibodies of the instant invention may be used to detect, monitor and/or quantify circulating tumor cells either in vivo or in vitro (WO 2012/0128801). In still other embodiments the circulating tumor cells may comprise tumorigenic cells.

[0412] In certain embodiments of the invention, the tumorigenic cells in a subject or a sample from a subject may be assessed or characterized using the disclosed antibodies prior to therapy or regimen to establish a baseline. In other examples, the tumorigenic cells can be assessed from a sample that is derived from a subject that was treated.

[0413] In another embodiment, the invention provides a method of analyzing cancer progression and/or pathogenesis in vivo. In another embodiment, analysis of cancer progression and/or pathogenesis in vivo comprises determining the extent of tumor progression. In another embodiment, analysis comprises the identification of the tumor. In another embodiment, analysis of tumor progression is performed on the primary tumor. In another embodiment, analysis is performed over time depending on the type of cancer as known to one skilled in the art. In another embodiment, further analysis of secondary tumors originating from metastasizing cells of the primary tumor is conducted in vivo. In another embodiment, the size and shape of secondary tumors are analyzed. In some embodiments, further ex vivo analysis is performed.

[0414] In another embodiment, the invention provides a method of analyzing cancer progression and/or pathogenesis in vivo including determining cell metastasis or detecting and quantifying the level of circulating tumor cells. In yet another embodiment, analysis of cell metastasis comprises determination of progressive growth of cells at a site that is discontinuous from the primary tumor. In some embodiments, procedures may be undertaken to monitor tumor cells that disperse via blood vasculature, lymphatics, within body cavities or combinations thereof. In another embodiment, cell metastasis analysis is performed in view of cell migration, dissemination, extravasation, proliferation or combinations thereof.

[0415] In certain examples, the tumorigenic cells in a subject or a sample from a subject may be assessed or characterized using the disclosed antibodies prior to therapy to establish a baseline. In other examples the sample is derived from a subject that was treated. In some examples the sample is taken from the subject at least about 1, 2, 4, 6, 7, 8, 10, 12, 14, 15, 16, 18, 20, 30, 60, 90 days, 6 months, 9 months, 12 months, or >12 months after the subject begins or terminates treatment. In certain examples, the tumorigenic cells are assessed or characterized after a certain number of doses (e.g., after 2, 5, 10, 20, 30 or more doses of a therapy). In other examples, the tumorigenic cells are characterized or assessed after 1 week, 2 weeks, 1 month, 2 months, 1 year, 2 years, 3 years, 4 years or more after receiving one or more therapies.

[0416] B. Screening

[0417] In certain embodiments, antibodies of the instant invention can be used to screen samples in order to identify compounds or agents (e.g., antibodies or ADCs) that alter a function or activity of tumor cells by interacting with a determinant. In one embodiment, tumor cells are put in contact with an antibody or ADC and the antibody or ADC can be used to screen the tumor for cells expressing a certain target (e.g. DLL3) in order to identify such cells for purposes, including but not limited to, diagnostic purposes, to monitor such cells to determine treatment efficacy or to enrich a cell population for such target-expressing cells.

[0418] In yet another embodiment, a method includes contacting, directly or indirectly, tumor cells with a test agent or compound and determining if the test agent or compound modulates an activity or function of the determinant-associated tumor cells for example, changes in cell morphology or viability, expression of a marker, differentiation or de-differentiation, cell respiration, mitochondrial activity, membrane integrity, maturation, proliferation, viability, apoptosis or cell death. One example of a direct interaction is physical interaction, while an indirect interaction includes, for example, the action of a composition upon an intermediary molecule that, in turn, acts upon the referenced entity (e.g., cell or cell culture).

[0419] Screening methods include high throughput screening, which can include arrays of cells (e.g., microarrays) positioned or placed, optionally at pre-determined locations, for example, on a culture dish, tube, flask, roller bottle or plate. High-throughput robotic or manual handling methods can probe chemical interactions and determine levels of expression of many genes in a short period of time. Techniques have been developed that utilize molecular signals, for example via fluorophores or microarrays (Mocellin and Rossi, 2007, PMID: 17265713) and automated analyses that process information at a very rapid rate (see, e.g., Pinhasov et al., 2004, PMID: 15032660). Libraries that can be screened include, for example, small molecule libraries, phage display libraries, fully human antibody yeast display libraries (Adimab), siRNA libraries, and adenoviral transfection vectors.

### VII. PHARMACEUTICAL PREPARATIONS AND THERAPEUTIC USES

[0420] A. Formulations and Routes of Administration

[0421] The antibodies or ADCs of the invention can be formulated in various ways using art recognized techniques. In some embodiments, the therapeutic compositions of the invention can be administered neat or with a minimum of additional components while others may optionally be formulated to contain suitable pharmaceutically acceptable carriers. As used herein, “pharmaceutically acceptable carriers” comprise excipients, vehicles, adjuvants and diluents that are well known in the art and can be available from commercial sources for use in pharmaceutical preparation (see, e.g., Gennaro (2003) Remington: The Science and Practice of Pharmacy with Facts and Comparisons: Drugfacts Plus, 20th ed., Mack Publishing; Ansel et al. (2004) Pharmaceutical Dosage Forms and Drug Delivery Systems, 7^{th} ed., Lippencott Williams and Wilkins; Kibbe et al. (2000) Handbook of Pharmaceutical Excipients, 3^{rd} ed., Pharmaceutical Press.)

[0422] Suitable pharmaceutically acceptable carriers comprise substances that are relatively inert and can facilitate administration of the antibody or ADC or can aid processing of the active compounds into preparations that are pharmaceutically optimized for delivery to the site of action.

[0423] Such pharmaceutically acceptable carriers include agents that can alter the form, consistency, viscosity, pH, tonicity, stability, osmolarity, pharmacokinetics, protein aggregation or solubility of the formulation and include buffering agents, wetting agents, emulsifying agents, diluents, encapsulating agents and skin penetration enhancers. Certain non-limiting examples of carriers include saline, buffered saline, dextrose, arginine, sucrose, water, glycerol, ethanol, sorbitol, dextran, sodium carboxymethyl cellulose and combinations thereof. Antibodies for systemic administration may be formulated for enteral, parenteral or topical administration. In certain embodiments the disclosed compositions will be formulated for intravenous administration and will preferably be infused using an IV container (e.g. an IV drip bag). Indeed, all three types of formulation may be used simultaneously to achieve systemic administration of the active ingredient. Excipients as well as formulations for parenteral and nonparenteral drug delivery are set forth in Remington: The Science and Practice of Pharmacy (2000) 20th Ed. Mack Publishing.

[0424] Suitable formulations for enteral administration include hard or soft gelatin capsules, pills, tablets, including coated tablets, elixirs, suspensions, syrups or inhalations and controlled release forms thereof.

[0425] Formulations suitable for parenteral administration (e.g., by injection or infusion), include aqueous or non-aqueous, isotonic, pyrogen-free, sterile liquids (e.g., solutions, suspensions), in which the active ingredient is dissolved, suspended, or otherwise provided (e.g., in a liposome or other microparticulate). Such liquids may additionally contain other pharmaceutically acceptable carriers, such as anti-oxidants, buffers, preservatives, stabilizers, bacteriostats, suspending agents, thickening agents, and solutes that render the formulation isotonic with the blood (or other relevant bodily fluid) of the intended recipient. Examples of excipients include, for example, water, alcohols, polyols, glycerol, vegetable oils, and the like. Examples of suitable isotonic pharmaceutically acceptable carriers for use in such formulations include Sodium Chloride Injection, Ringer's Solution, or Lactated Ringer's Injection.

[0426] In particularly preferred embodiments formulated compositions of the present invention may be lyophilized to provide a powdered form of the antibody or ADC which may then be reconstituted prior to administration. Sterile powders for the preparation of injectable solutions may be generated by lyophilizing a solution comprising the disclosed antibodies or ADCs to yield a powder comprising the active ingredient along with any optional co-solubilized biocompatible ingredients. Generally, dispersions or solutions are prepared by incorporating the active compound into a sterile vehicle that contains a basic dispersion medium or solvent (e.g., a diluent) and, optionally, other biocompatible ingredients. A compatible diluent is one which is pharmaceutically acceptable (safe and non-toxic for administration to a human) and is useful for the preparation of a liquid formulation, such as a formulation reconstituted after lyophilization. Exemplary diluents include sterile water, bacteriostatic water for injection (BWFI), a pH buffered solution (e.g. phosphate-buffered saline), sterile saline solution, Ringer's solution or dextrose solution. In an alternative embodiment, diluents can include aqueous solutions of salts and/or buffers.

[0427] In certain preferred embodiments the anti-DLL3 antibodies or ADCs will be lyophilized in combination with a pharmaceutically acceptable sugar. A “pharmaceutically acceptable sugar” is a molecule which, when combined with a protein of interest, significantly prevents or reduces chemical and/or physical instability of the protein upon storage. Such sugars are particularly compatible when the formulation is intended to be lyophilized and then reconstituted. As used herein pharmaceutically acceptable sugars may also be referred to as a “lyoprotectant”. Exemplary sugars and their corresponding sugar alcohols include: an amino acid such as monosodium glutamate or histidine; a methylamine such as betaine; a lyotropic salt such as magnesium sulfate; a polyol such as trihydric or higher molecular weight sugar alcohols, e.g. glycerin, dextran, erythritol, glycerol, arabitol, xylitol, sorbitol, and mannitol; propylene glycol; polyethylene glycol; PLURONICS®; and combinations thereof. Additional exemplary lyoprotectants include glycerin and gelatin, and the sugars mellibiose, melezitose, raffinose, mannotriose and stachyose. Examples of reducing sugars include glucose, maltose, lactose, maltulose, iso-maltulose and lactulose. Examples of non-reducing sugars include non-reducing glycosides of polyhydroxy compounds selected from sugar alcohols and other straight chain polyalcohols. Preferred sugar alcohols are monoglycosides, especially those compounds obtained by reduction of disaccharides such as lactose, maltose, lactulose and maltulose. The glycosidic side group can be either glucosidic or galactosidic. Additional examples of sugar alcohols are glucitol, maltitol, lactitol and iso-maltulose. The preferred pharmaceutically-acceptable sugars are the non-reducing sugars trehalose or sucrose. Pharmaceutically acceptable sugars are added to the formulation in a “protecting amount” (e.g. pre-lyophilization) which means that the protein essentially retains its physical and chemical stability and integrity during storage (e.g., after reconstitution and storage).

[0428] Those skilled in the art will appreciate that compatible lyoprotectant may be added to the liquid or lyophilized formulation at concentrations ranging from about 1 mM to about 1000 mM, from about 25 mM to about 750 mM, from about 50 mM to about 500 mM, from about 100 mM to about 300 mM, from about 125 mM to about 250 mM, from about 150 mM to about 200 mM or from about 165 mM to about 185 mM. In certain embodiments the lyoprotectant(s) may be added to provide a concentration of about 10 mM, about 25 mM, about 50 mM, about 75 mM, about 100 mM, about 125 mM, about 130 mM, about 140 mM, about 150 mM, about 160 mM, about 165 mM, about 170 mM, about 175 mM, about 180 mM, about 185 mM about 190 mM, about 200 mM, about 225 mM, about 250 mM, about 300 mM, about 400 mM, about 500 mM, about 600 mM, about 700 mM, about 800 mM about 900 mM, or about 1000 mM. In certain preferred embodiments the lyoprotectant(s) may comprise pharmaceutically acceptable sugars. In particularly preferred aspects the pharmaceutically acceptable sugars will comprise trehalose or sucrose.

[0429] In other selected embodiments liquid and lyophilized formulations of the instant invention may comprise certain compounds, including amino acids or pharmaceutically acceptable salts thereof, to act as stabilizing or buffering agents. Such compounds may be added at concentrations ranging from about 1 mM to about 100 mM, from about 5 mM to about 75 mM, from about 5 mM to about 50 mM, from about 10 mM to about 30 mM or from about 15 mM to about 25 mM. In certain embodiments the buffering agent(s) may be added to provide a concentration of about 1 mM, about 5 mM, about 10 mM, about 15 mM, about 20 mM, about 25 mM, about 30 mM, about 35 mM, about 40 mM, about 50 mM, about 60 mM, about 70 mM, about 80 mM, about 90 mM or about 100 mM. In other selected embodiments the buffering agent may be added to provide a concentration of about 5 mM, about 10 mM, about 15 mM, about 20 mM, about 25 mM, about 30 mM, about 35 mM, about 40 mM, about 50 mM, about 60 mM, about 70 mM, about 80 mM, about 90 mM or about 100 mM. In certain preferred embodiments the buffering agent will comprise histidine hydrochloride (e.g., L-histidine HCL).

[0430] In yet other selected embodiments liquid and lyophilized formulations of the instant invention may comprise nonionic surfactants such as polysorbate 20, polysorbate 40, polysorbate 60 or polysorbate 80 as stabilizing agents. Such compounds may be added at concentrations ranging from about 0.1 mgiml to about 2.0 mg/ml, from about 0.1 mg/ml to about 1.0 mg/ml, from about 0.2 mg/ml to about 0.8 mg/ml, from about 0.2 mg/ml to about 0.6 mg/ml or from about 0.3 mg/ml to about 0.5 mg/ml. In certain embodiments the surfactant may be added to provide a concentration of about 0.1 mg/ml, about 0.2 mg/ml, about 0.3 mg/ml, about 0.4 mg/ml, about 0.5 mg/ml, about 0.6 mg/ml, about 0.7 mg/ml, about 0.8 mg/ml, about 0.9 mg/ml or about 1.0 mg/ml. In other selected embodiments the surfactant may be added to provide a concentration of about 1.1 mg/ml, about 1.2 mg/ml, about 1.3 mg/ml, about 1.4 mg/ml, about 1.5 mg/ml, about 1.6 mg/ml, about 1.7 mg/ml, about 1.8 mg/ml, about 1.9 mg/ml or about 2.0 mg/ml. In certain preferred embodiments the surfactant will comprise polysorbate 20 or polysorbate 40. In particularly preferred aspects the surfactant will comprise polysorbate 20.

[0431] Whether reconstituted from a lyophilized powder or a native solution, compatible formulations of the disclosed antibodies or ADCs for parenteral administration (e.g., intravenous injection) may comprise ADC or antibody concentrations of from about 10 μg/mL to about 100 mg/mL. In certain selected embodiments antibody or ADC concentrations will comprise 20 μg/mL, 40 μg/mL, 60 μg/mL, 80 μg/mL, 100 μg/mL, 200 μg/mL, 300, μg/mL, 400 μg/mL, 500 μg/mL, 600 μg/mL, 700 μg/mL, 800 μg/mL, 900 μg/mL or 1 mg/mL. In other embodiments ADC concentrations will comprise 2 mg/mL, 3 mg/mL, 4 mg/mL, 5 mg/mL, 6 mg/mL, 8 mg/mL, 10 mg/mL, 12 mg/mL, 14 mg/mL, 16 mg/mL, 18 mg/mL, 20 mg/mL, 25 mg/mL, 30 mg/mL, 35 mg/mL, 40 mg/mL, 45 mg/mL, 50 mg/mL, 60 mg/mL, 70 mg/mL, 80 mg/mL, 90 mg/mL or 100 mg/mL.

[0432] In certain preferred aspects compositions of the present invention will comprise a liquid formulation comprising 10 mg/ml DLL3 ADC (e.g., hSC16.56DL1, hSC16.56ss1DL6, etc.), 20 mM histidine hydrochloride, 0.175M sucrose, 0.4 mg/mL polysorbate 20 at pH 6.0. In one aspect compositions of the instant invention comprise 10 mg/ml hSC16.56DL1 (i.e., Rova-T), 20 mM histidine hydrochloride, 0.175M sucrose, 0.4 mg/mL polysorbate 20 at pH 6.0. In another aspect compositions of the instant invention comprise 10 mg/ml hSC16.56ss1DL6, 20 mM histidine hydrochloride, 0.175M sucrose, 0.4 mg/mL polysorbate 20 at pH 6.0. As discussed herein, and shown in the Examples below, such liquid formulations may be lyophilized to provide powdered compositions that may be reconstituted with a pharmaceutically compatible (e.g., aqueous) carrier prior to use. When in a liquid solution such compositions should preferably be stored at -70° C. and protected from light. When lyophilized the DLL3 ADC powdered formulations should preferably be stored at 2-8° C. and protected from light. Each of the aforementioned solutions or powders is preferably contained in a sterile glass vial (e.g., USP Type 110 ml) and may be configured to consistently provide a set volume (e.g., 3 or 5 mL) of 10 mg/mL DLL3 ADC (in a native or reconstituted solution).

[0433] Whether reconstituted from lyophilized powder or not, the liquid DLL3 ADC formulations (e.g., as set forth immediately above) may be further diluted (preferably in an aqueous carrier) prior to administration. For example the aforementioned liquid formulations may further be diluted into an infusion bag containing 0.9% Sodium Chloride Injection, USP, or equivalent (mutatis mutandis), to achieve the desired dose level for administration. In certain aspects the fully diluted DLL3 ADO solution will be administered via intravenous infusion using an IV apparatus. Preferably the administered DLL3 ADO drug solution (whether by intravenous (IV) infusion or injection) is clear, colorless and free from visible particulates.

[0434] More generally the compounds and compositions of the invention may be administered in vivo, to a subject in need thereof, by various routes, including, but not limited to, oral, intravenous, intra-arterial, subcutaneous, parenteral, intranasal, intramuscular, intracardiac, intraventricular, intratracheal, buccal, rectal, intraperitoneal, intradermal, topical, transdermal, and intrathecal, or otherwise by implantation or inhalation. The subject compositions may be formulated into preparations in solid, semi-solid, liquid, or gaseous forms; including, but not limited to, tablets, capsules, powders, granules, ointments, solutions, suppositories, enemas, injections, inhalants, and aerosols. The appropriate formulation and route of administration may be selected according to the intended application and therapeutic regimen.

[0435] B. Dosages and Dosing Regimens

[0436] The particular dosage regimen, i.e., dose, timing and repetition, will depend on the individual subject, as well as empirical considerations such as pharmacokinetics (e.g., half-life, clearance rate, etc.). Determination of the frequency of administration may be made by persons skilled in the art, such as an attending physician based on considerations of the condition and severity of the condition being treated, age and general state of health of the subject being treated and the like. Frequency of administration may be adjusted over the course of therapy based on assessment of the efficacy of the selected composition and the dosing regimen. Such assessment can be made on the basis of markers of the specific disease, disorder or condition or assessments of the individuals wellbeing (as measured using quality of life assessments, activities of daily living, etc.). In embodiments where the individual has cancer, these include direct measurements of tumor size via palpation or visual observation; indirect measurement of tumor size by x-ray or other imaging techniques; an improvement as assessed by direct tumor biopsy and microscopic examination of a tumor sample; the measurement of an indirect tumor marker (e.g., PSA for prostate cancer) or an antigen identified according to the methods described herein; reduction in the number of proliferative or tumorigenic cells, maintenance of the reduction of such neoplastic cells; reduction of the proliferation of neoplastic cells; or delay in the development of metastasis.

[0437] The DLL3 ADCs of the invention may be administered in various ranges. These include about 5 μg/kg body weight to about 100 mg/kg body weight per dose; about 50 μg/kg body weight to about 5 mg/kg body weight per dose; about 100 μg/kg body weight to about 10 mg/kg body weight per dose. Other ranges include about 100 μg/kg body weight to about 20 mg/kg body weight per dose and about 0.5 mg/kg body weight to about 20 mg/kg body weight per dose. In certain embodiments, the dosage is at least about 100 μg/kg body weight, at least about 250 μg/kg body weight, at least about 750 μg/kg body weight, at least about 3 mg/kg body weight, at least about 5 mg/kg body weight, at least about 10 mg/kg body weight.

[0438] In selected embodiments the DLL3 antibodies or ADCs will be administered (preferably intravenously) at approximately 5, 10, 20, 30, 40, 50, 60, 70, 80, 90 or 100 μg/kg body weight per dose. Other embodiments may comprise the administration of antibodies or ADCs at about 200, 250, 300, 350, 400, 450, 500, 550, 600, 650, 700, 750, 800, 850, 900, 950, 1000, 1100, 1200, 1300, 1400, 1500, 1600, 1700, 1800, 1900 or 2000 μg/kg body weight per dose. In other embodiments the disclosed conjugates will be administered at 2.5, 3, 3.5, 4, 4.5, 5, 5.5, 6, 6.5, 7, 7.5, 8, 9 or 10 mg/kg. In still other embodiments the conjugates may be administered at 12, 14, 16, 18 or 20 mg/kg body weight per dose. In yet other embodiments the conjugates may be administered at 25, 30, 35, 40, 45, 50, 55, 60, 65, 70, 75, 80, 90 or 100 mg/kg body weight per dose. With the teachings herein one of skill in the art could readily determine appropriate dosages for various DLL3 antibodies or ADCs based on preclinical animal studies, clinical observations and standard medical and biochemical techniques and measurements.

[0439] Other dosing regimens may be predicated on Body Surface Area (BSA) calculations as disclosed in U.S. Pat. No. 7,744,877. As is well known, the BSA is calculated using the patient's height and weight and provides a measure of a subject's size as represented by the surface area of his or her body. In certain embodiments, the conjugates may be administered in dosages from 1 mg/m² to 800 mg/m², from 50 mg/m² to 500 mg/m² and at dosages of 100 mg/m², 150 mg/m², 200 mg/m², 250 mg/m², 300 mg/m², 350 mg/m², 400 mg/m² or 450 mg/m². It will also be appreciated that art recognized and empirical techniques may be used to determine appropriate dosage.

[0440] In other embodiments the anti-DLL3 antibodies or ADCs may be administered on a specific schedule. Generally, an effective dose of the DLL3 conjugate is administered to a subject one or more times. More particularly, an effective dose of the antibody or ADC is administered to the subject once a week, once every two weeks, once every three weeks, once a month or less than once a month. In certain embodiments, the effective dose of the DLL3 antibody or ADC may be administered multiple times, including for periods of at least a month, at least six months, at least a year, at least two years or a period of several years. In yet other embodiments, several days (2, 3, 4, 5, 6 or 7), several weeks (1, 2, 3, 4, 5, 6, 7 or 8) or several months (1, 2, 3, 4, 5, 6, 7 or 8) or even a year or several years may lapse between administration of the disclosed antibodies or ADCs.

[0441] In some embodiments the course of treatment involving conjugated antibodies will comprise multiple doses (cycles) of the selected drug product over a period of weeks or months. More specifically, antibodies or ADCs of the instant invention may be administered once every day, every two days, every four days, every week, every ten days, every two weeks, every three weeks, every four weeks, every five weeks, every six weeks, every eight weeks, every ten weeks every or every twelve weeks. In this regard it will be appreciated that the dosages may be altered or the interval may be adjusted based on patient response and clinical practices. The invention also contemplates discontinuous administration or daily doses divided into several partial administrations. The compositions of the instant invention and anti-cancer agent may be administered interchangeably, on alternate days or weeks; or a sequence of antibody treatments may be given, followed by one or more treatments of anti-cancer agent therapy. In any event, as will be understood by those of ordinary skill in the art, the appropriate doses of chemotherapeutic agents will be generally around those already employed in clinical therapies wherein the chemotherapeutics are administered alone or in combination with other chemotherapeutics.

[0442] In certain embodiments the present invention provides anti-DLL3 antibody drug conjugates for use in the treatment of cancer wherein the treatment may comprise administering an effective amount of an anti-DLL3 antibody drug conjugate (DLL3 ADC) at least once every week (QW), at least once every two weeks (Q2W), at least once every three weeks (Q3W), at least once every four weeks (Q4W), at least once every five weeks (Q5W), at least once every six weeks (Q6W), at least once every seven weeks (Q7W), at least once every eight weeks (08W), at least once every nine weeks (Q9W) or at least once every ten weeks (Q10W). In selected embodiments the DLL3 ADC will be administered at least every three weeks (Q3W), at least once every four weeks (Q4W), at least once every five weeks (Q5W) or at least once every six weeks (Q6W). In certain other embodiments the DLL3 ADC will be administered at least every seven weeks (Q7W), at least once every eight weeks (Q8W), at least once every nine weeks (Q9W) or at least once every ten weeks (Q10W). In other selected embodiments the DLL3 ADC will be administered at a dose of about 0.05 mg/kg, 0.1 mg/kg, 0.2 mg/kg, 0.3 mg/kg, 0.4 mg/kg, 0.5 mg/kg, 0.6 mg/kg, 0.7 mg/kg or 0.8 mg/kg. Certain embodiments will comprise treating the patient with a single administration of the DLL3 ADC. Yet other embodiments will comprise treating the patient at specified intervals (i.e. Q2W, Q3W, Q4W, Q5W, Q6W, etc) for two cycles (×2), for three cycles (×3), for four cycles (×4), for five cycles (×5), for six cycles (×6), for seven cycles (×7), for eight cycles (×8), for nine cycles (×9) or for ten cycles (×10). Still other aspects of the invention will comprise administering the DLL3 ADC an indefinite number of cycles depending on the response of the patient and any toxicity. In other embodiments the initial DLL3 ADC treatment (of x cycles) may be completed and no further DLL3 ADC treatment is undertaken until the cancer shows signs of progressing (treatment at progression). In yet other embodiments the initial DLL3 ADC treatment (of x cycles) may be completed and then the patient is put on maintenance therapy (e.g., 0.1 mg/kg DLL3 ADC Q6W indefinitely).

[0443] Exemplary dosing regimens compatible with the instant invention are set out below in Table 3. Note that, as discussed in more detail below, the disclosed exemplary dosing regimens are compatible with using DLL3 ADCs as a single agent or in combination with other therapeutic agents or cancer treatments (e.g., surgery or beam radiation).

TABLE 3

| | | | | |
|---|---|---|---|---|
| 0.05 mg/kg Q1W × 2 | 0.05 mg/kg Q1W × 3 | 0.05 mg/kg Q1W × 4 | 0.05 mg/kg Q1W × 5 | 0.05 mg/kg Q1W × 6 |
| 0.05 mg/kg Q2W × 2 | 0.05 mg/kg Q2W × 3 | 0.05 mg/kg Q2W × 4 | 0.05 mg/kg Q2W × 5 | 0.05 mg/kg Q2W × 6 |
| 0.05 mg/kg Q3W × 2 | 0.05 mg/kg Q3W × 3 | 0.05 mg/kg Q3W × 4 | 0.05 mg/kg Q3W × 5 | 0.05 mg/kg Q3W × 6 |
| 0.05 mg/kg Q4W × 2 | 0.05 mg/kg Q4W × 3 | 0.05 mg/kg Q4W × 4 | 0.05 mg/kg Q4W × 5 | 0.05 mg/kg Q4W × 6 |
| 0.05 mg/kg Q5W × 2 | 0.05 mg/kg Q5W × 3 | 0.05 mg/kg Q5W × 4 | 0.05 mg/kg Q5W × 5 | 0.05 mg/kg Q5W × 6 |
| 0.05 mg/kg Q6W × 2 | 0.05 mg/kg Q6W × 3 | 0.05 mg/kg Q6W × 4 | 0.05 mg/kg Q6W × 5 | 0.05 mg/kg Q6W × 6 |
| 0.05 mg/kg Q7W × 2 | 0.05 mg/kg Q7W × 3 | 0.05 mg/kg Q7W × 4 | 0.05 mg/kg Q7W × 5 | 0.05 mg/kg Q7W × 6 |
| 0.05 mg/kg Q8W × 2 | 0.05 mg/kg Q8W × 3 | 0.05 mg/kg Q8W × 4 | 0.05 mg/kg Q8W × 5 | 0.05 mg/kg Q8W × 6 |
| 0.05 mg/kg Q9W × 2 | 0.05 mg/kg Q9W × 3 | 0.05 mg/kg Q9W × 4 | 0.05 mg/kg Q9W × 5 | 0.05 mg/kg Q9W × 6 |
| 0.05 mg/kg Q10W × 2 | 0.05 mg/kg Q10W × 3 | 0.05 mg/kg Q10W × 4 | 0.05 mg/kg Q10W × 5 | 0.05 mg/kg Q10W × 6 |
| 0.1 mg/kg Q1W × 2 | 0.1 mg/kg Q1W × 3 | 0.1 mg/kg Q1W × 4 | 0.1 mg/kg Q1W × 5 | 0.1 mg/kg Q1W × 6 |
| 0.1 mg/kg Q2W × 2 | 0.1 mg/kg Q2W × 3 | 0.1 mg/kg Q2W × 4 | 0.1 mg/kg Q2W × 5 | 0.1 mg/kg Q2W × 6 |
| 0.1 mg/kg Q3W × 2 | 0.1 mg/kg Q3W × 3 | 0.1 mg/kg Q3W × 4 | 0.1 mg/kg Q3W × 5 | 0.1 mg/kg Q3W × 6 |
| 0.1 mg/kg Q4W × 2 | 0.1 mg/kg Q4W × 3 | 0.1 mg/kg Q4W × 4 | 0.1 mg/kg Q4W × 5 | 0.1 mg/kg Q4W × 6 |
| 0.1 mg/kg Q5W × 2 | 0.1 mg/kg Q5W × 3 | 0.1 mg/kg Q5W × 4 | 0.1 mg/kg Q5W × 5 | 0.1 mg/kg Q5W × 6 |
| 0.1 mg/kg Q6W × 2 | 0.1 mg/kg Q6W × 3 | 0.1 mg/kg Q6W × 4 | 0.1 mg/kg Q6W × 5 | 0.1 mg/kg Q6W × 6 |
| 0.1 mg/kg Q7W × 2 | 0.1 mg/kg Q7W × 3 | 0.1 mg/kg Q7W × 4 | 0.1 mg/kg Q7W × 5 | 0.1 mg/kg Q7W × 6 |
| 0.1 mg/kg Q8W × 2 | 0.1 mg/kg Q8W × 3 | 0.1 mg/kg Q8W × 4 | 0.1 mg/kg Q8W × 5 | 0.1 mg/kg Q8W × 6 |
| 0.1 mg/kg Q9W × 2 | 0.1 mg/kg Q9W × 3 | 0.1 mg/kg Q9W × 4 | 0.1 mg/kg Q9W × 5 | 0.1 mg/kg Q9W × 6 |
| 0.1 mg/kg Q10W × 2 | 0.1 mg/kg Q10W × 3 | 0.1 mg/kg Q10W × 4 | 0.1 mg/kg Q10W × 5 | 0.1 mg/kg Q10W × 6 |
| 0.2 mg/kg Q1W × 2 | 0.2 mg/kg Q1W × 3 | 0.2 mg/kg Q1W × 4 | 0.2 mg/kg Q1W × 5 | 0.2 mg/kg Q1W × 6 |
| 0.2 mg/kg Q2W × 2 | 0.2 mg/kg Q2W × 3 | 0.2 mg/kg Q2W × 4 | 0.2 mg/kg Q2W × 5 | 0.2 mg/kg Q2W × 6 |
| 0.2 mg/kg Q3W × 2 | 0.2 mg/kg Q3W × 3 | 0.2 mg/kg Q3W × 4 | 0.2 mg/kg Q3W × 5 | 0.2 mg/kg Q3W × 6 |
| 0.2 mg/kg Q4W × 2 | 0.2 mg/kg Q4W × 3 | 0.2 mg/kg Q4W × 4 | 0.2 mg/kg Q4W × 5 | 0.2 mg/kg Q4W × 6 |
| 0.2 mg/kg Q5W × 2 | 0.2 mg/kg Q5W × 3 | 0.2 mg/kg Q5W × 4 | 0.2 mg/kg Q5W × 5 | 0.2 mg/kg Q5W × 6 |
| 0.2 mg/kg Q6W × 2 | 0.2 mg/kg Q6W × 3 | 0.2 mg/kg Q6W × 4 | 0.2 mg/kg Q6W × 5 | 0.2 mg/kg Q6W × 6 |
| 0.2 mg/kg Q7W × 2 | 0.2 mg/kg Q7W × 3 | 0.2 mg/kg Q7W × 4 | 0.2 mg/kg Q7W × 5 | 0.2 mg/kg Q7W × 6 |
| 0.2 mg/kg Q8W × 2 | 0.2 mg/kg Q8W × 3 | 0.2 mg/kg Q8W × 4 | 0.2 mg/kg Q8W × 5 | 0.2 mg/kg Q8W × 6 |
| 0.2 mg/kg Q9W × 2 | 0.2 mg/kg Q9W × 3 | 0.2 mg/kg Q9W × 4 | 0.2 mg/kg Q9W × 5 | 0.2 mg/kg Q9W × 6 |
| 0.2 mg/kg Q10W × 2 | 0.2 mg/kg Q10W × 3 | 0.2 mg/kg Q10W × 4 | 0.2 mg/kg Q10W × 5 | 0.2 mg/kg Q10W × 6 |
| 0.3 mg/kg Q1W × 2 | 0.3 mg/kg Q1W × 3 | 0.3 mg/kg Q1W × 4 | 0.3 mg/kg Q1W × 5 | 0.3 mg/kg Q1W × 6 |
| 0.3 mg/kg Q2W × 2 | 0.3 mg/kg Q2W × 3 | 0.3 mg/kg Q2W × 4 | 0.3 mg/kg Q2W × 5 | 0.3 mg/kg Q2W × 6 |
| 0.3 mg/kg Q3W × 2 | 0.3 mg/kg Q3W × 3 | 0.3 mg/kg Q3W × 4 | 0.3 mg/kg Q3W × 5 | 0.3 mg/kg Q3W × 6 |
| 0.3 mg/kg Q4W × 2 | 0.3 mg/kg Q4W × 3 | 0.3 mg/kg Q4W × 4 | 0.3 mg/kg Q4W × 5 | 0.3 mg/kg Q4W × 6 |
| 0.3 mg/kg Q5W × 2 | 0.3 mg/kg Q5W × 3 | 0.3 mg/kg Q5W × 4 | 0.3 mg/kg Q5W × 5 | 0.3 mg/kg Q5W × 6 |
| 0.3 mg/kg Q6W × 2 | 0.3 mg/kg Q6W × 3 | 0.3 mg/kg Q6W × 4 | 0.3 mg/kg Q6W × 5 | 0.3 mg/kg Q6W × 6 |
| 0.3 mg/kg Q7W × 2 | 0.3 mg/kg Q7W × 3 | 0.3 mg/kg Q7W × 4 | 0.3 mg/kg Q7W × 5 | 0.3 mg/kg Q7W × 6 |
| 0.3 mg/kg Q8W × 2 | 0.3 mg/kg Q8W × 3 | 0.3 mg/kg Q8W × 4 | 0.3 mg/kg Q8W × 5 | 0.3 mg/kg Q8W × 6 |
| 0.3 mg/kg Q9W × 2 | 0.3 mg/kg Q9W × 3 | 0.3 mg/kg Q9W × 4 | 0.3 mg/kg Q9W × 5 | 0.3 mg/kg Q9W × 6 |
| 0.3 mg/kg Q10W × 2 | 0.3 mg/kg Q10W × 3 | 0.3 mg/kg Q10W × 4 | 0.3 mg/kg Q10W × 5 | 0.3 mg/kg Q10W × 6 |
| 0.4 mg/kg Q1W × 2 | 0.4 mg/kg Q1W × 3 | 0.4 mg/kg Q1W × 4 | 0.4 mg/kg Q1W × 5 | 0.4 mg/kg Q1W × 6 |
| 0.4 mg/kg Q2W × 2 | 0.4 mg/kg Q2W × 3 | 0.4 mg/kg Q2W × 4 | 0.4 mg/kg Q2W × 5 | 0.4 mg/kg Q2W × 6 |
| 0.4 mg/kg Q3W × 2 | 0.4 mg/kg Q3W × 3 | 0.4 mg/kg Q3W × 4 | 0.4 mg/kg Q3W × 5 | 0.4 mg/kg Q3W × 6 |
| 0.4 mg/kg Q4W × 2 | 0.4 mg/kg Q4W × 3 | 0.4 mg/kg Q4W × 4 | 0.4 mg/kg Q4W × 5 | 0.4 mg/kg Q4W × 6 |
| 0.4 mg/kg Q5W × 2 | 0.4 mg/kg Q5W × 3 | 0.4 mg/kg Q5W × 4 | 0.4 mg/kg Q5W × 5 | 0.4 mg/kg Q5W × 6 |
| 0.4 mg/kg Q6W × 2 | 0.4 mg/kg Q6W × 3 | 0.4 mg/kg Q6W × 4 | 0.4 mg/kg Q6W × 5 | 0.4 mg/kg Q6W × 6 |
| 0.4 mg/kg Q7W × 2 | 0.4 mg/kg Q7W × 3 | 0.4 mg/kg Q7W × 4 | 0.4 mg/kg Q7W × 5 | 0.4 mg/kg Q7W × 6 |
| 0.4 mg/kg Q8W × 2 | 0.4 mg/kg Q8W × 3 | 0.4 mg/kg Q8W × 4 | 0.4 mg/kg Q8W × 5 | 0.4 mg/kg Q8W × 6 |
| 0.4 mg/kg Q9W × 2 | 0.4 mg/kg Q9W × 3 | 0.4 mg/kg Q9W × 4 | 0.4 mg/kg Q9W × 5 | 0.4 mg/kg Q9W × 6 |
| 0.4 mg/kg Q10W × 2 | 0.4 mg/kg Q10W × 3 | 0.4 mg/kg Q10W × 4 | 0.4 mg/kg Q10W × 5 | 0.4 mg/kg Q10W × 6 |
| 0.5 mg/kg Q1W × 2 | 0.5 mg/kg Q1W × 3 | 0.5 mg/kg Q1W × 4 | 0.5 mg/kg Q1W × 5 | 0.5 mg/kg Q1W × 6 |
| 0.5 mg/kg Q2W × 2 | 0.5 mg/kg Q2W × 3 | 0.5 mg/kg Q2W × 4 | 0.5 mg/kg Q2W × 5 | 0.5 mg/kg Q2W × 6 |
| 0.5 mg/kg Q3W × 2 | 0.5 mg/kg Q3W × 3 | 0.5 mg/kg Q3W × 4 | 0.5 mg/kg Q3W × 5 | 0.5 mg/kg Q3W × 6 |
| 0.5 mg/kg Q4W × 2 | 0.5 mg/kg Q4W × 3 | 0.5 mg/kg Q4W × 4 | 0.5 mg/kg Q4W × 5 | 0.5 mg/kg Q4W × 6 |
| 0.5 mg/kg Q5W × 2 | 0.5 mg/kg Q5W × 3 | 0.5 mg/kg Q5W × 4 | 0.5 mg/kg Q5W × 5 | 0.5 mg/kg Q5W × 6 |
| 0.5 mg/kg Q6W × 2 | 0.5 mg/kg Q6W × 3 | 0.5 mg/kg Q6W × 4 | 0.5 mg/kg Q6W × 5 | 0.5 mg/kg Q6W × 6 |
| 0.5 mg/kg Q7W × 2 | 0.5 mg/kg Q7W × 3 | 0.5 mg/kg Q7W × 4 | 0.5 mg/kg Q7W × 5 | 0.5 mg/kg Q7W × 6 |
| 0.5 mg/kg Q8W × 2 | 0.5 mg/kg Q8W × 3 | 0.5 mg/kg Q8W × 4 | 0.5 mg/kg Q8W × 5 | 0.5 mg/kg Q8W × 6 |
| 0.5 mg/kg Q9W × 2 | 0.5 mg/kg Q9W × 3 | 0.5 mg/kg Q9W × 4 | 0.5 mg/kg Q9W × 5 | 0.5 mg/kg Q9W × 6 |
| 0.5 mg/kg Q10W × 2 | 0.5 mg/kg Q10W × 3 | 0.5 mg/kg Q10W × 4 | 0.5 mg/kg Q10W × 5 | 0.5 mg/kg Q10W × 6 |

[0444] In some aspects of the invention the DLL3 ADC will comprise a PBD. In other aspects the DLL3 will comprise SC16LD6.5 (e.g., hSC16.56DL1 or ADC1). In other aspects the DLL3 ADC will comprise a site-specific ADC and, in certain preferred aspects, will comprise hSC16.56ss1PBD1 (e.g., hSC16.56ss1DL6 or ADC6). In yet other aspects the DLL3 ADC will be administered intravenously. In certain other aspects the cancer to be treated will comprise a neuroendocrine tumor. In other aspects the cancer to be treated will comprise small cell lung cancer (SCLC) or large cell neuroendocrine cancer (LCNEC). Certain embodiments will comprise using the disclosed compositions to treat frontline patients (i.e., patients that have not been treated for the particular cancer). In selected embodiments the frontline patients will exhibit extensive-stage SCLC or limited stage SCLC. In other selected aspects the cancer patients to be treated will comprise second line patients (i.e., previously treated patients). In yet other embodiments the cancer patients to be treated will comprise third line patients (i.e., patients that have been treated twice previously). In still other embodiments the cancer patients will comprise fourth line patients (i.e., patients that have been treated three times previously).

[0445] Certain preferred embodiments of the invention will comprise treating a patient with 0.2 mg/kg of DLL3 ADC every 3 weeks for 3 cycles (0.2 mg/kg Q3W×3). In selected embodiments the patient to be treated at 0.2 mg/kg Q3W×3 will be suffering from SCLC. In other embodiments the patient to be treated at 0.2 mg/kg Q3W×3 will be suffering from LCNEC. In some aspects the patient has not been treated for the cancer. In certain aspects the patient will comprise a second line patient. In yet other embodiments the patient will comprise a third line patient. In other aspects the patient will be treated at progression following the 0.2 mg/kg Q3W×3 treatment cycle. In yet other aspects the patient will be shifted to DLL3 ADC maintenance therapy following the 0.2 mg/kg Q3W×3 treatment cycle. In yet other embodiments the DLL3 ADC will comprise SC16LD6.5 (e.g., ADC1) while in still other embodiments the DLL3 ADC will comprise h16.56ss1DL6.

[0446] In such treatments (and as discussed in more detail below) the DLL3 ADC may be combined with selected anti-cancer agent(s) to improve patient response. For certain subjects the DLL3 ADC may be administered every three weeks for two or more cycles (e.g., 0.2 mg/kg Q3W×2 or 0.2 mg/kg Q3W×3, etc.) either before or after the administration of one or more anti-cancer agent(s). In selected embodiments the subject will be suffering from SCLC and the anti-cancer agents will be cisplatin, carboplatin and/or etoposide. Accordingly, one exemplary dosing regimen may comprise DLL3 ADC at 0.2 mg/kg Q3W×2 or 0.2 mg/kg Q3W×3 followed by cisplatin (e.g., at 80 mg/m²) and etoposide (e.g., at 100 mg/m²) where each may be administered at, for example, Q3W×4. Thus, in such instances one regimen would comprise DLL3 ADC at 0.2 mg/kg Q3W×2 or 0.2 mg/kg Q3W×3; CDDP and ETP at Q3W×4 where the CDDP/ETP regimen may be started one week, two weeks, three weeks, four weeks, five weeks, six weeks or later following conclusion of the DLL3 ADC cycle. In other compatible embodiments the CDDP/ETP may be given prior to treatment with the DLL3 ADC (i.e., CDDP/ETP at Q3W×4; DLL3 ADC at 0.2 mg/kg Q3W×2 or 0.2 mg/kg Q3W×3 where the DLL3 ADC regimen may be started one week, two weeks, three weeks, four weeks, five weeks, six weeks or later following completion of the CDDP/ETP cycles). In still other embodiments the CDDP/ETP regimen and the DLL3 ADC regimen (substantially as described above but optionally with a DLL3 ADC dosage of 0.1 mg/kg) may be given concurrently (i.e., they both start on week 1). In certain embodiments the subject to be treated in accordance with the aforementioned regimens will be a frontline patient. In other preferred embodiments the frontline patient will be suffering from SCLC or LCNEC. In yet other embodiments cisplatin will be administered at 60 mg/m² while in still other embodiments cisplatin/etoposide combinations may be given every 3 weeks (Platinum D1, Etoposide D1, 2, 3, every 3 weeks×4 or ×6). In still other embodiments Carboplatin (5 AUC)/Etoposide may be administered with a similar frequency to CDDP/E Q21d×4-6 cycles. In yet other embodiments the DLL3 ADCs may be administered to the patient prior to any chemotherapeutic agent (including carboplatin, cisplatin and/or etoposide) to act as a sensitizing agent and potentiate the effects of the therapeutic combination.

[0447] As discussed above, selected embodiments of the invention comprise ADCs that have improved pharmacokinetic and pharmacodynamic properties which provide for an enhanced therapeutic index and allow for optimization of dosing regimens. In this regard the disclosed ADCs will have a terminal half-life exceeding six days, a terminal half-life of greater than seven days or a terminal half-life of greater than eight days when measured as set forth herein. Still other aspects of the invention will comprise ADCs having a terminal half-life of greater than nine days, a terminal half-life of greater than ten days, a terminal half-life of greater than eleven days, a terminal half-life of greater than twelve days (each as measured in human subjects). In still other embodiments the disclosed ADCs will have a terminal half-life of greater than thirteen days, a terminal half-life of greater than about fourteen days, a terminal half-life of greater than fifteen days, a terminal half-life of greater than about sixteen days, a terminal half-life of greater than about seventeen days, a terminal half-life of greater than eighteen days, a terminal half-life of greater than about nineteen days, a terminal half-life of greater than about twenty days or a terminal half-life of greater than three weeks in human subjects. In yet other embodiments the ADCs of the invention will exhibit a terminal half-life of about six days, a terminal half-life of about seven days, a terminal half-life of about eight days, a terminal half-life of about nine days, a terminal half-life of about ten days, a terminal half-life of about eleven days, a terminal half-life of about twelve days, a terminal half-life of about thirteen days, a terminal half-live of about fourteen days, a terminal half-life of about fifteen days, a terminal half-life of about sixteen days, a terminal half-life of about seventeen days, a terminal half-life of about eighteen days, a terminal half-life of about nineteen days, a terminal half-life of about twenty days or a terminal half-live of about three weeks. Those of skill in the art will appreciate that such protracted half-lives will allow for less frequent dosing of the disclosed ADCs thereby providing the desired efficacy while exhibiting similar or reduced toxicity.

[0448] Accordingly, certain other preferred embodiments of the invention will comprise treating a patient with 0.3 mg/kg of DLL3 ADC every 6 weeks for 2 or more cycles (e.g., 0.3 mg/kg Q6W×2). As shown below in the Examples such a regimen may be particularly effective (exhibit an efficacious therapeutic index) because of the relatively long half-life of the DLL3 ADCs of the instant invention. In selected embodiments the patient to be treated at 0.3 mg/kg Q6W×2 will be suffering from SCLC. In other embodiments the patient to be treated at 0.3 mg/kg Q6W×2 will be suffering from LCNEC. Still other embodiments will comprise administering DLL3 ADCs at 0.3 mg/kg Q6W for three cycles (×3), for four cycles (×4), for five cycles (×5) for six cycles (×6) or more. In such embodiments the cycles may be continuous (every six weeks) or intermittent (skip every third cycle then resume). In some aspects the patient has not been treated for the cancer (frontline). In certain aspects the patient will comprise a second line patient. In yet other embodiments the patient will comprise a third line patient. In other aspects the patient will be treated at progression following the 0.3 mg/kg Q6W×2 treatment cycle. In yet other aspects the patient will be shifted to DLL3 ADC maintenance therapy following the 0.3 mg/kg Q6W×2 treatment cycle. In certain embodiments the DLL3 ADC will comprise SC16LD6.5 (e.g., ADC1) while in other preferred aspects the DLL3 ADC will comprise hSC16.56ss1DL6 (e.g., ADC6).

[0449] As discussed in more detail below the DLL3 ADC may be combined with selected anti-cancer agent(s) to improve patient response. For certain subjects the DLL3 ADC may be administered every six weeks for two cycles (e.g., 0.3 mg/kg Q6W×2) either before or after the administration of one or more anti-cancer agent(s). In selected embodiments the subject will be suffering from SCLC and the anti-cancer agents will be cisplatin, carboplatin and/or etoposide. Accordingly, one exemplary dosing regimen may comprise DLL3 ADC at 0.3 mg/kg Q6W×2 followed by cisplatin (e.g., at 80 mg/m²) and etoposide (e.g., at 100 mg/m²) where each are administered at, for example, Q3W×4. Thus, in such instances one cycle would comprise DLL3 ADC at 0.3 mg/kg Q6W×2; CDDP and ETP at Q3W×4 where the CDDP/ETP regimen may be started one week, two weeks, three weeks, four weeks, five weeks, six weeks or later following conclusion of the DLL3 ADC cycle. In other compatible embodiments the CDDP/ETP may be given prior to treatment with the DLL3 ADC (i.e., CDDP/ETP at Q3W×4; DLL3 ADC at 0.3 mg/kg Q6W×2 where the DLL3 ADC regimen may be started one week, two weeks, three weeks, four weeks, five weeks, six weeks or later following completion of the CDDP/ETP cycles). In still other embodiments the CDDP/ETP regimen and the DLL3 ADC regimen (substantially as described above but optionally with a DLL3 ADC dosage of 0.1 mg/kg) may be given concurrently (i.e., they both start on week 1). In certain embodiments the subject to be treated in accordance with the aforementioned regimens will be a frontline patient. In other preferred embodiments the frontline patient will be suffering from SCLC or LCNEC. In yet other embodiments cisplatin will be administered at 60 mg/m² while in still other embodiments cisplatin/etoposide combinations may be given every 3 weeks (Platinum D1, Etoposide D1, 2, 3, every 3 weeks×4 or ×6). In still other embodiments Carboplatin (5 AUC)/Etoposide may be administered with a similar frequency to CDDP/E Q21d×4-6 cycles. In yet other embodiments the DLL3 ADCs may be administered to the patient prior to any chemotherapeutic agent (including carboplatin, cisplatin and/or etoposide) to act as a sensitizing agent and potentiate the effects of the therapeutic combination.

[0450] In further embodiments the DLL3 ADCs of the instant invention may be administered at different dosages in any one cycle. For example, the drug may be administered (i.e., loaded or drug loading) at a relatively high dose (e.g., 0.5 mg/kg) followed by a lower dose of DLL3 ADC (e.g., 0.2 mg/kg) four weeks later (Q4W) as part of the same cycle. Again such cycles may be repeated (2×, 3×, etc.) or delayed until progression (treat at progression) or followed up by DLL3 ADC maintenance (e.g., 0.1 mg/kg Q4W indefinite or 0.1 mg/kg Q6W indefinite). In this regard the DLL3 antibodies or ADCs of the instant invention may be used in a maintenance therapy setting to reduce or eliminate the chance of tumor recurrence following the initial presentation of the disease. Such maintenance therapy may be used whether the first treatment was with DLL3 ADC or another anti-neoplastic agent or treatment (e.g., radiation, surgery, chemotherapy, etc.). Preferably the disorder will have been treated and the initial tumor mass eliminated, reduced or otherwise ameliorated so the patient is asymptomatic or in remission. At such time the subject may be administered pharmaceutically effective amounts of the disclosed ADCs one or more times even though there is little or no indication of disease using standard diagnostic procedures. In preferred embodiments the DLL3 ADC will comprise a PBD and in selected embodiments will comprise SC16LD6.5 or SC16.56ss1 DL6.

[0451] In certain embodiments the maintenance therapy will comprise the administration of DLL3 ADCs following chemotherapeutic treatment including standard of care (SOC) chemotherapeutic treatments. In selected aspects this maintenance therapy will comprise frontline patients initially treated with SOC chemotherapeutics such as cisplatin/etoposide which is followed by a DLL3 ADC maintenance regimen. By way of example a patient may be treated with one or more cycles of frontline chemotherapy (e.g., four cycles of platinum-based chemotherapy) followed by the administration of one or more cycles of DLL3 ADCs. In certain embodiments the DLL3 ADCs may be administered at 0.3 mg/kg Q6W omitting every third cycle. It will be appreciated that such maintenance regimens may be continued as long as the patient is responding and not exhibiting disease progression or adverse events.

[0452] In another preferred embodiment the antibodies or ADCs of the present invention may be used to prophylactically or as an adjuvant therapy to prevent or reduce the possibility of tumor metastasis following a debulking procedure. As used in the instant disclosure a “debulking procedure” means any procedure, technique or method that reduces the tumor mass or ameliorates the tumor burden or tumor proliferation. Exemplary debulking procedures include, but are not limited to, surgery, radiation treatments (i.e., beam radiation), chemotherapy, immunotherapy or ablation. At appropriate times readily determined by one skilled in the art in view of the instant disclosure the disclosed ADCs may be administered as suggested by clinical, diagnostic or theragnostic procedures to reduce tumor metastasis and the possibility of tumor recurrence.

[0453] Yet other embodiments of the invention comprise administering the disclosed antibodies or ADCs to subjects that are asymptomatic but at risk of developing cancer. That is, the antibodies or ADCs of the instant invention may be used in a truly preventative sense and given to patients that have been examined or tested and have one or more noted risk factors (e.g., genomic indications, family history, in vivo or in vitro test results, etc.) but have not developed neoplasia.

[0454] Dosages and regimens may also be determined empirically for the disclosed therapeutic compositions in individuals who have been given one or more administration(s). For example, individuals may be given incremental dosages of a therapeutic composition produced as described herein. In selected embodiments the dosage may be gradually increased or reduced or attenuated based respectively on empirically determined or observed side effects or toxicity. To assess efficacy of the selected composition, a marker of the specific disease, disorder or condition can be followed as described previously. For cancer, these include direct measurements of tumor size via palpation or visual observation, indirect measurement of tumor size by x-ray or other imaging techniques; an improvement as assessed by direct tumor biopsy and microscopic examination of the tumor sample; the measurement of an indirect tumor marker (e.g., PSA for prostate cancer) or a tumorigenic antigen identified according to the methods described herein, a decrease in pain or paralysis; improved speech, vision, breathing or other disability associated with the tumor; increased appetite; or an increase in quality of life as measured by accepted tests or prolongation of survival. It will be apparent to one of skill in the art that the dosage will vary depending on the individual, the type of neoplastic condition, the stage of neoplastic condition, whether the neoplastic condition has begun to metastasize to other location in the individual, and the past and concurrent treatments being used.

[0455] C. Combination Therapies

[0456] As alluded to above combination therapies may be particularly useful in decreasing or inhibiting unwanted neoplastic cell proliferation, decreasing the occurrence of cancer, decreasing or preventing the recurrence of cancer, or decreasing or preventing the spread or metastasis of cancer. In such cases the antibodies or ADCs of the instant invention may function as sensitizing or chemosensitizing agents by removing CSCs that would otherwise prop up and perpetuate the tumor mass and thereby allow for more effective use of current standard of care debulking or anti-cancer agents. That is, the disclosed antibodies or ADCs may, in certain embodiments, provide an enhanced effect (e.g., additive or synergistic in nature) that potentiates the mode of action of another administered therapeutic agent. In the context of the instant invention “combination therapy” shall be interpreted broadly and merely refers to the administration of an anti-DLL3 antibody or ADC and one or more anti-cancer agents that include, but are not limited to, cytotoxic agents, cytostatic agents, anti-angiogenic agents, debulking agents, chemotherapeutic agents, radiotherapy and radiotherapeutic agents, targeted anti-cancer agents (including both monoclonal antibodies and small molecule entities), BRMs, therapeutic antibodies, cancer vaccines, cytokines, hormone therapies, radiation therapy and anti-metastatic agents and immunotherapeutic agents, including both specific and non-specific approaches.

[0457] There is no requirement for the combined results to be additive of the effects observed when each treatment (e.g., DLL3 ADC and an anti-cancer agent) is conducted separately. Although at least additive effects are generally desirable, any increased anti-tumor effect above one of the single therapies is beneficial. Furthermore, the invention does not require the combined treatment to exhibit synergistic effects. However, those skilled in the art will appreciate that with certain selected combinations that comprise preferred embodiments, synergism may be observed.

[0458] As such, In certain aspects the combination therapy has therapeutic synergy or improves the measurable therapeutic effects in the treatment of cancer over (i) the anti-DLL3 antibody or ADC used alone, or (ii) the therapeutic moiety used alone, or (iii) the use of the therapeutic moiety in combination with another therapeutic moiety without the addition of an anti-DLL3 antibody or ADC. The term “therapeutic synergy”, as used herein, means the combination of an anti-DLL3 antibody or ADC and one or more therapeutic moiety(ies) having a therapeutic effect greater than the additive effect of the combination of the anti-DLL3 antibody or ADC and the one or more therapeutic moiety(ies).

[0459] Desired outcomes of the disclosed combinations are quantified by comparison to a control or baseline measurement. As used herein, relative terms such as “improve,” “increase,” or “reduce” indicate values relative to a control, such as a measurement in the same individual prior to initiation of treatment described herein, or a measurement in a control individual (or multiple control individuals) in the absence of the anti-DLL3 antibodies or ADCs described herein but in the presence of other therapeutic moiety(ies) such as standard of care treatment. A representative control individual is an individual afflicted with the same form of cancer as the individual being treated, who is about the same age as the individual being treated (to ensure that the stages of the disease in the treated individual and the control individual are comparable).

[0460] Changes or improvements in response to therapy (whether additive or synergistic) may prove to be statistically significant. As used herein, the term “significance” or “significant” relates to a statistical analysis of the probability that there is a non-random association between two or more measured responses. To determine whether or not a relationship is “significant” or has “significance,” a “p-value” can be calculated. P-values that fall below a user-defined cut-off point are regarded as significant. For the purposes of the instant invention a p-value less than or equal to 0.1, less than 0.05, less than 0.01, less than 0.005, or less than 0.001 may be regarded as significant.

[0461] A synergistic therapeutic effect may be an effect of at least about two-fold greater than the therapeutic effect elicited by a single therapeutic moiety or anti-DLL3 antibody or ADC, or the sum of the therapeutic effects elicited by the anti-DLL3 antibody or ADC or the single therapeutic moiety(ies) of a given combination, or at least about five-fold greater, or at least about ten-fold greater, or at least about twenty-fold greater, or at least about fifty-fold greater, or at least about one hundred-fold greater. A synergistic therapeutic effect may also be observed as an increase in therapeutic effect of at least 10% compared to the therapeutic effect elicited by a single therapeutic moiety or anti-DLL3 antibody or ADC, or the sum of the therapeutic effects elicited by the anti-DLL3 antibody or ADC or the single therapeutic moiety(ies) of a given combination, or at least 20%, or at least 30%, or at least 40%, or at least 50%, or at least 60%, or at least 70%, or at least 80%, or at least 90%, or at least 100%, or more. A synergistic effect is also an effect that permits reduced dosing of therapeutic agents when they are used in combination.

[0462] In practicing combination therapy, the anti-DLL3 antibody or ADC and therapeutic moiety(ies) may be administered to the subject simultaneously, either in a single composition, or as two or more distinct compositions using the same or different administration routes. Alternatively, treatment with the anti-DLL3 antibody or ADC may precede or follow the therapeutic moiety treatment by, e.g., intervals ranging from minutes to weeks. In one embodiment, both the therapeutic moiety and the antibody or ADC are administered within about 5 minutes to about two weeks of each other. In yet other embodiments, several days (2, 3, 4, 5, 6 or 7), several weeks (1, 2, 3, 4, 5, 6, 7 or 8) or several months (1, 2, 3, 4, 5, 6, 7 or 8) may lapse between administration of the antibody and the therapeutic moiety.

[0463] The combination therapy can be administered until the condition is treated, palliated or cured on various schedules such as once, twice or three times daily, once every two days, once every three days, once weekly, once every two weeks, once every month, once every two months, once every three months, once every six months, or may be administered continuously. The antibody and therapeutic moiety(ies) may be administered on alternate days or weeks; or a sequence of anti-DLL3 antibody or ADC treatments may be given, followed by one or more treatments with the additional therapeutic moiety. In one embodiment an anti-DLL3 antibody or ADC is administered in combination with one or more therapeutic moiety(ies) for short treatment cycles. In other embodiments the combination treatment is administered for long treatment cycles or in a maintenance therapy type setting.

[0464] In selected embodiments the compounds and compositions of the present invention may be used in conjunction with checkpoint inhibitors such as PD-1 inhibitors or PD-L1 inhibitors. PD-1, together with its ligand PD-L1, are negative regulators of the antitumor T lymphocyte response. In one embodiment the combination therapy may comprise the administration of anti-DLL3 antibodies or ADCs together with an anti-PD-1 antibody (e.g. pembrolizumab, nivolumab, pidilizumab) and optionally one or more other therapeutic moiety(ies). In another embodiment the combination therapy may comprise the administration of anti-DLL3 antibodies or ADCs together with an anti-PD-L1 antibody (e.g. avelumab, atezolizumab, durvalumab) and optionally one or more other therapeutic moiety(ies). In yet another embodiment, the combination therapy may comprise the administration of anti-DLL3 antibodies or ADCs together with an anti PD-1 antibody or anti-PD-L1 administered to patients who continue progress following treatments with checkpoint inhibitors and/or targeted BRAF combination therapies (e.g. vemurafenib or dabrafinib). As discussed herein and set forth in the Examples below such therapeutic combinations may prove to be surprisingly efficacious in inhibiting tumor growth and propagation.

[0465] While not wishing to be bound by any particular theory the results set forth herein suggest that the DLL3 ADC may bind and kill DLL3 expressing tumor cells in a manner that activates and/or attracts immunocompetent cells, including T-lymphocytes, to the tumor site. Moreover, eliminating or disrupting DLL3+ cancer stem cells through administration of DLL3 ADCs (e.g., by cellular disruption) may release CSC specific antigens that focus the subject's immune response on the germinal “seed cells” of the tumor. It will be appreciated that this patient-mediated focused immune attack on cancer stem cells can provide a mechanism for enhanced elimination of tumorigenic cells and corresponding inhibition of tumor growth or maintenance. The presence of PD-1 antibodies may then act to prevent the newly activated T-lymphocytes from receiving inhibitory signals through the PD-1 receptor on their surface (e.g., by engaging PD-L1 or PD-L2 ligands) and maintain or enhance the focused immune response. Thus, treatment with the DLL3 ADC may enhance the anti-tumorigenic effects of the administered PD-1 antibodies by generating or attracting newly activated T cells to eliminate cancer stem cells at the tumor site while, at the same time or subsequently, the PD-1 antibodies may enhance the anti-tumor effect of the CSC activated T-lymphocytes thereby eliminating more tumor cells than would otherwise be possible in the absence of the checkpoint inhibitors.

[0466] It will be appreciated that such DLL3 ADC/checkpoint inhibitor (e.g., an anti-PD-1 antibody) combinations allow for dosages and corresponding dosing regimens to be attenuated to provide particularly beneficial therapeutic profiles. More specifically such combinations may allow for the effective inhibition or elimination of tumorigenic cells at lower (or more infrequent) doses of either or both drugs when compared to their use as single agents. Thus, in certain aspects of the instant invention it may be possible to use relatively lower doses (as compared to use as a single agent) of the disclosed DLL3 ADCs with an anti-PD-1 antibody and still provide a therapeutic response with less toxicity. For example, rather than using the disclosed DLL3 ADC dosing regimens of 0.2 mg/kg Q3W×3 or 0.3 mg/kg Q6W×2 as discussed above, it may be possible to obtain equivalent therapeutic results using a lower DLL3 ADC dosage (e.g., 0.1 mg/kg, 0.05 mg/kg, etc) in combination with PD-1 antibodies. Similarly, effective therapeutic results may be obtained using a DLL3 ADC/anti-PD-1 combination with reduced or attenuated regimens such as fewer DLL3 ADC cycles (e.g., 0.2 mg/kg Q3W×2) or extended time between DLL3 ADC dosing (e.g., 0.2 mg/kg Q4W×2). In each such scenario (i.e., lower doses or extended dosing) it will be appreciated that the unexpected benefits provided by the disclosed therapeutic combinations allow for the effective treatment of the patient with relatively less toxicity. This, in turn, provides healthier patients that are better able to tolerate necessary treatments and/or prolong the therapeutic regimen to increase the odds of a positive response.

[0467] In other embodiments the anti-DLL3 antibodies or ADCs may be used in combination with various approved first line cancer treatments. In selected embodiments the combination therapy comprises the use of an anti-DLL3 antibody or ADC and a cytotoxic agent such as ifosfamide, mytomycin C, vindesine, vinblastine, etoposide, ironitecan, gemcitabine, taxanes, vinorelbine, methotrexate, and pemetrexed) and optionally one or more other therapeutic moiety(ies).

[0468] In another embodiment the combination therapy comprises the use of an anti-DLL3 antibody or ADC and a platinum-based drug (e.g. carboplatin or cisplatin) and optionally one or more other therapeutic moiety(ies) (e.g. vinorelbine; gemcitabine; a taxane such as, for example, docetaxel or paclitaxel; irinotican; or pemetrexed).

[0469] In certain embodiments, for example in the treatment of BR-ERPR, BR-ER or BR-PR cancer, the combination therapy comprises the use of an anti-DLL3 antibody or ADC and one or more therapeutic moieties described as “hormone therapy”. “Hormone therapy” as used herein, refers to, e.g., tamoxifen; gonadotropin or luteinizing releasing hormone (GnRH or LHRH); everolimus and exemestane; toremifene; or aromatase inhibitors (e.g. anastrozole, letrozole, exemestane or fulvestrant).

[0470] In another embodiment, for example, in the treatment of BR-HER2, the combination therapy comprises the use of an anti-DLL3 antibody or ADC and trastuzumab or ado-trastuzumab emtansine (Kadcyla®) and optionally one or more other therapeutic moiety(ies) (e.g. pertuzumab and/or docetaxel).

[0471] In some embodiments, for example, in the treatment of metastatic breast cancer, the combination therapy comprises the use of an anti-DLL3 antibody or ADC and a taxane (e.g. docetaxel or paclitaxel) and optionally an additional therapeutic moiety(ies), for example, an anthracycline (e.g. doxorubicin or epirubicin) and/or eribulin.

[0472] In another embodiment, for example, in the treatment of metastatic or recurrent breast cancer or BRCA-mutant breast cancer, the combination therapy comprises the use of an anti-DLL3 antibody or ADC and megestrol and optionally an additional therapeutic moiety(ies).

[0473] In further embodiments, for example, in the treatment of BR-TNBC, the combination therapy comprises the use of an anti-DLL3 antibody or ADC and a poly ADP ribose polymerase (PARP) inhibitor (e.g. BMN-673, olaparib, rucaparib and veliparib) and optionally an additional therapeutic moiety(ies).

[0474] In another embodiment the combination therapy comprises the use of an anti-DLL3 antibody or ADC and a PARP inhibitor and optionally one or more other therapeutic moiety(ies).

[0475] In another embodiment, for example, in the treatment of breast cancer, the combination therapy comprises the use of an anti-DLL3 antibody or ADC and cyclophosphamide and optionally an additional therapeutic moiety(ies) (e.g. doxorubicin, a taxane, epirubicin, 5-FU and/or methotrexate.

[0476] In another embodiment combination therapy for the treatment of EGFR-positive NSCLC comprises the use of an anti-DLL3 antibody or ADC and afatinib and optionally one or more other therapeutic moiety(ies) (e.g. erlotinib and/or bevacizumab).

[0477] In another embodiment combination therapy for the treatment of EGFR-positive NSCLC comprises the use of an anti-DLL3 antibody or ADC and erlotinib and optionally one or more other therapeutic moiety(ies) (e.g. bevacizumab).

[0478] In another embodiment combination therapy for the treatment of ALK-positive NSCLC comprises the use of an anti-DLL3 antibody or ADC and ceritinib (Zykadia) and optionally one or more other therapeutic moiety(ies).

[0479] In another embodiment combination therapy for the treatment of ALK-positive NSCLC comprises the use of an anti-DLL3 antibody or ADC and crizotinib (Xalcori) and optionally one or more other therapeutic moiety(ies).

[0480] In another embodiment the combination therapy comprises the use of an anti-DLL3 antibody or ADC and bevacizumab and optionally one or more other therapeutic moiety(ies) (e.g. gemcitabine or a taxane such as, for example, docetaxel or paclitaxel; and/or a platinum analog).

[0481] In another embodiment the combination therapy comprises the use of an anti-DLL3 antibody or ADC and bevacizumab and optionally cyclophosphamide.

[0482] In a particular embodiment the combination therapy for the treatment of platinum-resistant tumors comprises the use of an anti-DLL3 antibody or ADC and doxorubicin and/or etoposide and/or gemcitabine and/or vinorelbine and/or ifosfamide and/or leucovorin-modulated 5-fluoroucil and/or bevacizumab and/or tamoxifen; and optionally one or more other therapeutic moiety(ies).

[0483] In selected embodiments the disclosed antibodies and ADCs may be used in combination with certain steroids to potentially make the course of treatment more effective and reduce side effects such as inflammation, nausea and hypersensitivity. Exemplary steroids that may be used on combination with the ADCs of the instant invention include, but are not limited to, hydrocortisone, dexamethasone, prednisone, methylprednisolone and prednisolone. In particularly preferred aspects the steroid will comprise dexamethasone. In other preferred aspects the steroid will comprise prednisone.

[0484] Combination therapy may also comprise an anti-DLL3 antibody or ADC and a chemotherapeutic moiety that is effective on a tumor (e.g. melanoma) comprising a mutated or aberrantly expressed gene or protein (e.g. BRAF V600E).

[0485] T lymphocytes (e.g., cytotoxic lymphocytes (CTL)) play an important role in host defense against malignant tumors. CTL are activated by the presentation of tumor associated antigens on antigen presenting cells. Active specific immunotherapy is a method that can be used to augment the T lymphocyte response to cancer by vaccinating a patient with peptides derived from known cancer associated antigens. In one embodiment the combination therapy may comprise an anti-DLL3 antibody or ADC and a vaccine to a cancer associated antigen (e.g. melanocyte-lineage specific antigen tyrosinase, gp100, Melan-A/MART-1 or gp75.) In other embodiments the combination therapy may comprise administration of an anti-DLL3 antibody or ADC together with in vitro expansion, activation, and adoptive reintroduction of autologous CTLs or natural killer cells. CTL activation may also be promoted by strategies that enhance tumor antigen presentation by antigen presenting cells. Granulocyte macrophage colony stimulating factor (GM-CSF) promotes the recruitment of dendritic cells and activation of dendritic cell cross-priming. In one embodiment the combination therapy may comprise the isolation of antigen presenting cells, activation of such cells with stimulatory cytokines (e.g. GM-CSF), priming with tumor-associated antigens, and then adoptive reintroduction of the antigen presenting cells into patients in combination with the use of anti-DLL3 antibodies or ADCs and optionally one or more different therapeutic moiety(ies).

[0486] In some embodiments the anti-DLL3 antibodies or ADCs may be used in combination with various first line melanoma treatments. In one embodiment the combination therapy comprises the use of an anti-DLL3 antibody or ADC and dacarbazine and optionally one or more other therapeutic moiety(ies). In further embodiments the combination therapy comprises the use of an anti-DLL3 antibody or ADC and temozolamide and optionally one or more other therapeutic moiety(ies). In another embodiment the combination therapy comprises the use of an anti-DLL3 antibody or ADC and a platinum-based therapeutic moiety (e.g. carboplatin or cisplatin) and optionally one or more other therapeutic moiety(ies). In some embodiments the combination therapy comprises the use of an anti-DLL3 antibody or ADC and a vinca alkaloid therapeutic moiety (e.g. vinblastine, vinorelbine, vincristine, or vindesine) and optionally one or more other therapeutic moiety(ies). In one embodiment the combination therapy comprises the use of an anti-DLL3 antibody or ADC and interleukin-2 and optionally one or more other therapeutic moiety(ies). In another embodiment the combination therapy comprises the use of an anti-DLL3 antibody or ADC and interferon-alpha and optionally one or more other therapeutic moiety(ies).

[0487] In other embodiments, the anti-DLL3 antibodies or ADCs may be used in combination with adjuvant melanoma treatments and/or a surgical procedure (e.g. tumor resection). In one embodiment the combination therapy comprises the use of an anti-DLL3 antibody or ADC and interferon-alpha and optionally one or more other therapeutic moiety(ies).

[0488] The invention also provides for the combination of anti-DLL3 antibodies or ADCs with radiotherapy. The term “radiotherapy”, as used herein, means, any mechanism for inducing DNA damage locally within tumor cells such as gamma-irradiation, X-rays, UV-irradiation, microwaves, electronic emissions and the like. Combination therapy using the directed delivery of radioisotopes to tumor cells is also contemplated, and may be used in combination or as a conjugate of the anti-DLL3 antibodies disclosed herein. Typically, radiation therapy is administered in pulses over a period of time from about 1 to about 2 weeks. Optionally, the radiation therapy may be administered as a single dose or as multiple, sequential doses.

[0489] In other embodiments an anti-DLL3 antibody or ADC may be used in combination with one or more of the anti-cancer agents described below.

[0490] D. Anti-Cancer Agents

[0491] The term “anti-cancer agent” as used herein is one subset of “therapeutic moieties” which, in turn, is a subset of the agents described as “pharmaceutically active moieties.” More particularly “anti-cancer agent” means any agent (or a pharmaceutically acceptable salt thereof) that can be used to treat a cell proliferative disorder such as cancer, and includes, but is not limited to, cytotoxic agents, cytostatic agents, anti-angiogenic agents, debulking agents, chemotherapeutic agents, radiotherapeutic agents, targeted anti-cancer agents, biological response modifiers, therapeutic antibodies, cancer vaccines, cytokines, hormone therapy, anti-metastatic agents and immunotherapeutic agents. Note that the foregoing classifications of anti-cancer agents are not exclusive of each other and that selected agents may fall into one or more categories. For example, a compatible anti-cancer agent may be classified as a cytotoxic agent and a chemotherapeutic agent. Accordingly, each of the foregoing terms should be construed in view of the instant disclosure and then in accordance with their use in the medical arts.

[0492] In preferred embodiments an anti-cancer agent can include any chemical agent (e.g., a chemotherapeutic agent) that inhibits or eliminates, or is designed to inhibit or eliminate, a cancerous cell or a cell likely to become cancerous or generate tumorigenic progeny (e.g., tumorigenic cells). In this regard selected chemical agents (cell-cycle dependent agents) are often directed to intracellular processes necessary for cell growth or division, and are thus particularly effective against cancerous cells, which generally grow and divide rapidly. For example, vincristine depolymerizes microtubules and thus inhibits rapidly dividing tumor cells from entering mitosis. In other cases the selected chemical agents are cell-cycle independent agents that interfere with cell survival at any point of its lifecycle and may be effective in directed therapeutics (e.g., ADCs). By way of example certain pyrrolobenzodiazepines bind to the minor groove of cellular DNA and inhibit transcription upon delivery to the nucleus. With regard to combination therapy or selection of an ADC component it will be appreciated that one skilled in the art could readily identify compatible cell-cycle dependent agents and cell-cycle independent agents in view of the instant disclosure.

[0493] In any event, and as alluded to above, it will be appreciated that selected anti-cancer agents may be administered in combination with each other (e.g., CHOP therapy) in addition to the anti-DLL3 antibodies and ADCs disclosed herein. Moreover, it will further be appreciated that in certain embodiments such anti-cancer agents may comprise conjugates and may be associated with antibodies prior to administration. In some aspects the disclosed anti-cancer agent will be linked to an anti-DLL3 antibody to provide an ADC as disclosed herein.

[0494] As used herein the term “cytotoxic agent” (or cytotoxin) generally means a substance that is toxic to cells in that it decreases or inhibits cellular function and/or causes the destruction of tumor cells. In certain embodiments the substance is a naturally occurring molecule derived from a living organism or an analog thereof (purified from natural sources or synthetically prepared). Examples of cytotoxic agents include, but are not limited to, small molecule toxins or enzymatically active toxins of bacteria (e.g., calicheamicin, Diptheria toxin, Pseudomonas endotoxin and exotoxin, Staphylococcal enterotoxin A), fungal (e.g., α-sarcin, restrictocin), plants (e.g., abrin, ricin, modeccin, viscumin, pokeweed anti-viral protein, saporin, gelonin, momoridin, trichosanthin, barley toxin, Aleurites fordii proteins, dianthin proteins, Phytolacca mericana proteins [PAPI, PAPII, and PAP-S], Momordica charantia inhibitor, curcin, crotin, saponaria officinalis inhibitor, mitegellin, restrictocin, phenomycin, neomycin, and the tricothecenes) or animals, (e.g., cytotoxic RNases, such as extracellular pancreatic RNases; DNase I, including fragments and/or variants thereof). Additional compatible cytotoxic agents including certain radioisotopes, maytansinoids, auristatins, dolastatins, duocarmycins, amanitins and pyrrolobenzodiazepines are set forth herein.

[0495] More generally examples of cytotoxic agents or anti-cancer agents that may be used in combination with (or conjugated to) the antibodies of the invention include, but are not limited to, alkylating agents, alkyl sulfonates, anastrozole, amanitins, aziridines, ethylenimines and methylamelamines, acetogenins, a camptothecin, BEZ-235, bortezomib, bryostatin, callystatin, CC-1065, ceritinib, crizotinib, cryptophycins, dolastatin, duocarmycin, eleutherobin, erlotinib, pancratistatin, a sarcodictyin, spongistatin, nitrogen mustards, antibiotics, enediyne dynemicin, bisphosphonates, esperamicin, chromoprotein enediyne antiobiotic chromophores, aclacinomysins, actinomycin, authramycin, azaserine, bleomycins, cactinomycin, canfosfamide, carabicin, carminomycin, carzinophilin, chromomycinis, cyclosphosphamide, dactinomycin, daunorubicin, detorubicin, 6-diazo-5-oxo-L-norleucine, doxorubicin, epirubicin, esorubicin, exemestane, fluorouracil, fulvestrant, gefitinib, idarubicin, lapatinib, letrozole, lonafarnib, marcellomycin, megestrol acetate, mitomycins, mycophenolic acid, nogalamycin, olivomycins, pazopanib, peplomycin, potfiromycin, puromycin, quelamycin, rapamycin, rodorubicin, sorafenib, streptonigrin, streptozocin, tamoxifen, tamoxifen citrate, temozolomide, tepodina, tipifarnib, tubercidin, ubenimex, vandetanib, vorozole, XL-147, zinostatin, zorubicin; anti-metabolites, folic acid analogues, purine analogs, androgens, anti-adrenals, folic acid replenisher such as frolinic acid, aceglatone, aldophosphamide glycoside, aminolevulinic acid, eniluracil, amsacrine, bestrabucil, bisantrene, edatraxate, defofamine, demecolcine, diaziquone, elfornithine, elliptinium acetate, epothilone, etoglucid, gallium nitrate, hydroxyurea, lentinan, lonidainine, maytansinoids, mitoguazone, mitoxantrone, mopidanmol, nitraerine, pentostatin, phenamet, pirarubicin, losoxantrone, podophyllinic acid, 2-ethylhydrazide, procarbazine, polysaccharide complex, razoxane; rhizoxin; SF-1126, sizofiran; spirogermanium; tenuazonic acid; triaziquone; 2,2′,2″-trichlorotriethylamine; trichothecenes (T-2 toxin, verracurin A, roridin A and anguidine); urethan; vindesine; dacarbazine; mannomustine; mitobronitol; mitolactol; pipobroman; gacytosine; arabinoside; cyclophosphamide; thiotepa; taxoids, chloranbucil; gemcitabine; 6-thioguanine; mercaptopurine; methotrexate; platinum analogs, vinblastine; platinum; etoposide; ifosfamide; mitoxantrone; vincristine; vinorelbine; novantrone; teniposide; edatrexate; daunomycin; aminopterin; xeloda; ibandronate; irinotecan, topoisomerase inhibitor RFS 2000; difluorometlhylornithine; retinoids; capecitabine; combretastatin; leucovorin; oxaliplatin; XL518, inhibitors of PKC-alpha, Raf, H-Ras, EGFR and VEGF-A that reduce cell proliferation and pharmaceutically acceptable salts or solvates, acids or derivatives of any of the above. Also included in this definition are anti-hormonal agents that act to regulate or inhibit hormone action on tumors such as anti-estrogens and selective estrogen receptor antibodies, aromatase inhibitors that inhibit the enzyme aromatase, which regulates estrogen production in the adrenal glands, and anti-androgens; as well as troxacitabine (a 1,3-dioxolane nucleoside cytosine analog); antisense oligonucleotides, ribozymes such as a VEGF expression inhibitor and a HER2 expression inhibitor; vaccines, PROLEUKIN® rIL-2; LURTOTECAN® topoisomerase 1 inhibitor; ABARELIX® rmRH; Vinorelbine and Esperamicins and pharmaceutically acceptable salts or solvates, acids or derivatives of any of the above.

[0496] Compatible cytotoxic agents or anti-cancer agents may also comprise commercially or clinically available compounds such as erlotinib (TARCEVA®, Genentech/OSI Pharm.), docetaxel (TAXOTERE®, Sanofi-Aventis), 5-FU (fluorouracil, 5-fluorouracil, CAS No. 51-21-8), gemcitabine (GEMZAR®, Lilly), PD-0325901 (CAS No. 391210-10-9, Pfizer), cisplatin (cis-diamine, dichloroplatinum(II), CAS No. 15663-27-1), carboplatin (CAS No. 41575-94-4), paclitaxel (TAXOL®, Bristol-Myers Squibb Oncology, Princeton, N.J.), trastuzumab (HERCEPTIN®, Genentech), temozolomide (4-methyl-5-oxo-2,3,4,6,8-pentazabicyclo [4.3.0] nona-2,7,9-triene-9-carboxamide, CAS No. 85622-93-1, TEMODAR®, TEMODAL®, Schering Plough), tamoxifen ((Z)-2-[4-(1,2-diphenylbut-1-enyl)phenoxy]-N,N-dimethylethanamine, NOLVADEX®, ISTUBAL®, VALODEX®), and doxorubicin (ADRIAMYCIN®). Additional commercially or clinically available anti-cancer agents comprise oxaliplatin (ELOXATIN®, Sanofi), bortezomib (VELCADE®, Millennium Pharm.), sutent (SUNITINIB®, SU11248, Pfizer), letrozole (FEMARA®, Novartis), imatinib mesylate (GLEEVEC®, Novartis), XL-518 (Mek inhibitor, Exelixis, WO 2007/044515), ARRY-886 (Mek inhibitor, AZD6244, Array BioPharma, Astra Zeneca), SF-1126 (PI3K inhibitor, Semafore Pharmaceuticals), BEZ-235 (PI3K inhibitor, Novartis), XL-147 (PI3K inhibitor, Exelixis), PTK787/ZK 222584 (Novartis), fulvestrant (FASLODEX®, AstraZeneca), leucovorin (folinic acid), rapamycin (sirolimus, RAPAMUNE®, Wyeth), lapatinib (TYKERB®, GSK572016, Glaxo Smith Kline), lonafarnib (SARASAR™, SCH 66336, Schering Plough), sorafenib (NEXAVAR®, BAY43-9006, Bayer Labs), gefitinib (IRESSA®, AstraZeneca), irinotecan (CAMPTOSAR®, CPT-11, Pfizer), tipifarnib (ZARNESTRA™, Johnson & Johnson), ABRAXANE™ (Cremophor-free), albumin-engineered nanoparticle formulations of paclitaxel (American Pharmaceutical Partners, Schaumberg, II), vandetanib (rINN, ZD6474, ZACTIMA®, AstraZeneca), chloranmbucil, AG1478, AG1571 (SU 5271; Sugen), temsirolimus (TORISEL®, Wyeth), pazopanib (GlaxoSmithKline), canfosfamide (TELCYTA®, Telik), thiotepa and cyclosphosphamide (CYTOXAN®, NEOSAR®); vinorelbine (NAVELBINE®); capecitabine (XELODA®, Roche), tamoxifen (including NOLVADEX®; tamoxifen citrate, FARESTON® (toremifine citrate) MEGASE® (megestrol acetate), AROMASIN® (exemestane; Pfizer), formestanie, fadrozole, RIVISOR® (vorozole), FEMARA® (letrozole; Novartis), and ARIMIDEX® (anastrozole; AstraZeneca).

[0497] The term “pharmaceutically acceptable salt” or “salt” means organic or inorganic salts of a molecule or macromolecule. Acid addition salts can be formed with amino groups. Exemplary salts include, but are not limited, to sulfate, citrate, acetate, oxalate, chloride, bromide, iodide, nitrate, bisulfate, phosphate, acid phosphate, isonicotinate, lactate, salicylate, acid citrate, tartrate, oleate, tannate, pantothenate, bitartrate, ascorbate, succinate, maleate, gentisinate, fumarate, gluconate, glucuronate, saccharate, formate, benzoate, glutamate, methanesulfonate, ethanesulfonate, benzenesulfonate, p-toluenesulfonate, and pamoate (i.e., 1,1′ methylene bis-(2-hydroxy 3-naphthoate)) salts. A pharmaceutically acceptable salt may involve the inclusion of another molecule such as an acetate ion, a succinate ion or other counterion. The counterion may be any organic or inorganic moiety that stabilizes the charge on the parent compound. Furthermore, a pharmaceutically acceptable salt may have more than one charged atom in its structure. Where multiple charged atoms are part of the pharmaceutically acceptable salt, the salt can have multiple counter ions. Hence, a pharmaceutically acceptable salt can have one or more charged atoms and/or one or more counterion.

[0498] Similarly a “Pharmaceutically acceptable solvate” or “solvate” refers to an association of one or more solvent molecules and a molecule or macromolecule. Examples of solvents that form pharmaceutically acceptable solvates include, but are not limited to, water, isopropanol, ethanol, methanol, DMSO, ethyl acetate, acetic acid, and ethanolamine.

[0499] In other embodiments the antibodies or ADCs of the instant invention may be used in combination with any one of a number of antibodies (or immunotherapeutic agents) presently in clinical trials or commercially available. The disclosed antibodies may be used in combination with an antibody selected from the group consisting of abagovomab, adecatumumab, afutuzumab, alemtuzumab, altumomab, amatuximab, anatumomab, arcitumomab, atezolizumab, avelumab, bavituximab, bectumomab, bevacizumab, bivatuzumab, blinatumomab, brentuximab, cantuzumab, catumaxomab, cetuximab, citatuzumab, cixutumumab, clivatuzumab, conatumumab, dacetuzumab, dalotuzumab, daratumumab, detumomab, drozitumab, duligotumab, durvalumab, dusigitumab, ecromeximab, elotuzumab, ensituximab, ertumaxomab, etaracizumab, farletuzumab, ficlatuzumab, figitumumab, flanvotumab, futuximab, ganitumab, gemtuzumab, girentuximab, glembatumumab, ibritumomab, igovomab, imgatuzumab, indatuximab, inotuzumab, intetumumab, ipilimumab, iratumumab, labetuzumab, lambrolizumab, lexatumumab, lintuzumab, lorvotuzumab, lucatumumab, mapatumumab, matuzumab, milatuzumab, minretumomab, mitumomab, moxetumomab, narnatumab, naptumomab, necitumumab, nimotuzumab, nivolumab, nofetumomabn, obinutuzumab, ocaratuzumab, ofatumumab, olaratumab, olaparib, onartuzumab, oportuzumab, oregovomab, panitumumab, parsatuzumab, patritumab, pembrolizumab pemtumomab, pertuzumab, pidilizumab, pintumomab, pritumumab, racotumomab, radretumab, ramucirumab, rilotumumab, rituximab, robatumumab, satumomab, selumetinib, sibrotuzumab, siltuximab, simtuzumab, solitomab, tacatuzumab, taplitumomab, tenatumomab, teprotumumab, tigatuzumab, tositumomab, trastuzumab, tucotuzumab, ublituximab, veltuzumab, vorsetuzumab, votumumab, zalutumumab, CC49, 3F8, MED10680, MDX-1105 and combinations thereof.

[0500] Other embodiments comprise the use of antibodies approved for cancer therapy including, but not limited to, rituximab, gemtuzumab ozogamcin, alemtuzumab, ibritumomab tiuxetan, tositumomab, bevacizumab, cetuximab, patitumumab, ofatumumab, ipilimumab and brentuximab vedotin. Those skilled in the art will be able to readily identify additional anti-cancer agents that are compatible with the teachings herein.

[0501] E. Radiotherapy

[0502] As briefly discussed above the present invention also provides for the combination of antibodies or ADCs with radiotherapy (i.e., any mechanism for inducing DNA damage locally within tumor cells such as gamma-irradiation, X-rays, UV-irradiation, microwaves, electronic emissions and the like). Combination therapy using the directed delivery of radioisotopes to tumor cells is also contemplated and the disclosed antibodies or ADCs may be used in connection with a targeted anti-cancer agent or other targeting means. Typically, radiation therapy is administered in pulses over a period of time from about 1 to about 2 weeks. The radiation therapy may be administered to subjects having head and neck cancer for about 6 to 7 weeks. Optionally, the radiation therapy may be administered as a single dose or as multiple, sequential doses.

### VIII. INDICATIONS

[0503] The invention provides for the use of antibodies and ADCs of the invention for the diagnosis, theragnosis, treatment and/or prophylaxis of various disorders including proliferative disorders, neoplastic, inflammatory, angiogenic and immunologic disorders and disorders caused by pathogens. In certain embodiments the diseases to be treated comprise neoplastic conditions and in certain other aspects comprise solid tumors. In other embodiments the diseases to be treated comprise hematologic malignancies. In still other embodiments the antibodies or ADCs of the invention will be used to treat tumors or tumorigenic cells expressing a DLL3 determinant. Preferably the “subject” or “patient” to be treated will be human although, as used herein, the terms are expressly held to comprise any mammalian species.

[0504] It will be appreciated that the compounds and compositions of the instant invention may be used to treat subjects at various stages of disease and at different points in their treatment cycle. Accordingly, in certain embodiments the antibodies and ADCs of the instant invention will be used as a front line therapy and administered to subjects who have not previously been treated for the cancerous condition. In other embodiments the antibodies and ADCs of the invention will be used to treat second and third line patients (i.e., those subjects that have previously been treated for the same condition one or two times respectively). Still other embodiments will comprise the treatment of fourth line or higher patients (e.g., SCLC patients) that have been treated for the same or related condition three or more times with the disclosed DLL3 ADCs or with different therapeutic agents. In other embodiments the compounds and compositions of the present invention will be used to treat subjects that have previously been treated (with antibodies or ADCs of the present invention or with other anti-cancer agents) and have relapsed or are determined to be refractory to the previous treatment. In selected embodiments the compounds and compositions of the instant invention may be used to treat subjects that have recurrent tumors.

[0505] As discussed above and shown in the appended Examples the compounds and compositions of the instant invention may be used to treat any subject suffering from a DLL3+ tumor (e.g., a tumor with a DLL3 H-score of 90 or above and/or the tumor expresses DLL3 in 20% of cells) preferably determined using IHC and/or an H-score derived as set forth herein. In this regard one embodiment of the invention comprises treatment of a patient with an H-score of at least 90 with the disclosed DLL3 ADCs. In other embodiments a patient to be treated with the DLL3 ADCs of the instant invention will have a DLL3 H-score of at least 120. In yet other embodiments a patient to be treated with the DLL3 ADCs of the instant invention will have a DLL3 H-score of at least 150 and more preferably will have a DLL3 H-score of at least 180. Still other embodiments will comprise DLL3+ tumors wherein the tumor expresses DLL3 in at least 20%, 30% 40% or at least 50% of the constituent cells as determined by staining. In certain preferred embodiments the H-score or percentage of cells stained will be measured using a sample obtained from a SCLC tumor. In other embodiments the H-score or percentage of cells stained will be measured using a sample obtained from a large cell neuroendocrine carcinoma, a glioblastoma, a melanoma or a medullary thyroid tumor. In still other embodiments the H-score or percentage of stained cells will be measured using a sample obtained from a tumor exhibiting neuroendocrine features.

[0506] In certain aspects the proliferative disorder will comprise a solid tumor including, but not limited to, adrenal, liver, kidney, bladder, breast, gastric, ovarian, cervical, uterine, esophageal, colorectal, prostate (e.g., prostate adenocarcinoma), pancreatic, lung (both small cell and non-small cell), thyroid, carcinomas, sarcomas, glioblastomas and various head and neck tumors. In other preferred embodiments, and as shown in the Examples below, the disclosed ADCs are particularly effective at treating small cell lung cancer (SCLC) and non-small cell lung cancer (NSCLC) (e.g., squamous cell non-small cell lung cancer or squamous cell small cell lung cancer). In certain embodiments the lung cancer is refractory, relapsed or resistant to a platinum based agent (e.g., carboplatin, cisplatin, oxaliplatin, topotecan) and/or a taxane (e.g., docetaxel, paclitaxel, larotaxel or cabazitaxel). In another embodiment the subject to be treated is suffering from large cell neuroendocrine carcinoma (LCNEC). In still other aspects of the invention the disclosed antibodies and ADCs may be used for the treatment of medullary thyroid cancer, glioblastoma, neuroendocrine prostate cancer, (NEPC), high-grade gastroenteropancreatic cancer (GEP) and malignant melanoma.

[0507] More generally exemplary neoplastic conditions subject to treatment in accordance with the instant invention may be benign or malignant; solid tumors or hematologic malignancies; and may be selected from the group including, but not limited to: adrenal gland tumors, AIDS-associated cancers, alveolar soft part sarcoma, astrocytic tumors, autonomic ganglia tumors, bladder cancer (squamous cell carcinoma and transitional cell carcinoma), blastocoelic disorders, bone cancer (adamantinoma, aneurismal bone cysts, osteochondroma, osteosarcoma), brain and spinal cord cancers, metastatic brain tumors, breast cancer, carotid body tumors, cervical cancer, chondrosarcoma, chordoma, chromophobe renal cell carcinoma, clear cell carcinoma, colon cancer, colorectal cancer, cutaneous benign fibrous histiocytomas, desmoplastic small round cell tumors, ependymomas, epithelial disorders, Ewing's tumors, extraskeletal myxoid chondrosarcoma, fibrogenesis imperfecta ossium, fibrous dysplasia of the bone, gallbladder and bile duct cancers, gastric cancer, gastrointestinal, gestational trophoblastic disease, germ cell tumors, glandular disorders, head and neck cancers, hypothalamic, intestinal cancer, islet cell tumors, Kaposi's Sarcoma, kidney cancer (nephroblastoma, papillary renal cell carcinoma), leukemias, lipoma/benign lipomatous tumors, liposarcoma/malignant lipomatous tumors, liver cancer (hepatoblastoma, hepatocellular carcinoma), lymphomas, lung cancers (small cell carcinoma, adenocarcinoma, squamous cell carcinoma, large cell carcinoma etc.), macrophagal disorders, medulloblastoma, melanoma, meningiomas, medullary thyroid cancer, multiple endocrine neoplasia, multiple myeloma, myelodysplastic syndrome, neuroblastoma, neuroendocrine tumors, ovarian cancer, pancreatic cancers, papillary thyroid carcinomas, parathyroid tumors, pediatric cancers, peripheral nerve sheath tumors, phaeochromocytoma, pituitary tumors, prostate cancer, posterious unveal melanoma, rare hematologic disorders, renal metastatic cancer, rhabdoid tumor, rhabdomysarcoma, sarcomas, skin cancer, soft-tissue sarcomas, squamous cell cancer, stomach cancer, stromal disorders, synovial sarcoma, testicular cancer, thymic carcinoma, thymoma, thyroid metastatic cancer, and uterine cancers (carcinoma of the cervix, endometrial carcinoma, and leiomyoma).

[0508] In still other preferred embodiments the compounds or compositions will be administered to a subject suffering from melanoma. More generally the compositions and methods disclosed herein may be used to diagnose, monitor, treat or prevent melanoma. The term “melanoma”, as used herein, includes all types of melanoma including, but not limited to, primary melanoma, malignant melanoma, cutaneous melanoma, extracutaneous melanoma, superficial spreading melanoma, polypoid melanoma, melanocarcinomas, melanoepitheliomas, melanosarcomas, melanoma in situ, nodular malignant melanoma, lentigo maligna melanoma, lentiginous melanoma, lentiginous malignant melanoma, mucosal lentiginous melanoma, mucosal melanoma, acral lentiginous melanoma, soft tissue melanoma, ocular melanoma, invasive melanoma, familial atypical mole and melanoma (FAM-M) syndrome, desmoplastic malignant melanoma or uveal melanoma.

[0509] Metastatic melanoma may be derived from melanocytes, melanocytic nevi or dysplastic nevi and can evolve through different phases of tumor progression (e.g. radial growth phase or vertical growth phase. Melanoma can be caused by chromosomal abnormalities, degenerative growth and/or developmental disorders, mitogenic agents, ultraviolet radiation, viral infections, carcinogenic agents, various genetic mutations or abnormal expression of a gene.

[0510] As alluded to above the disclosed antibodies and ADCs are especially effective at treating lung cancer, including the following subtypes: small cell lung cancer and non-small cell lung cancer (e.g. squamous cell non-small cell lung cancer or squamous cell small cell lung cancer) and large cell neuroendocrine carcinoma. In selected embodiments the antibodies and ADCs can be administered to patients exhibiting limited stage disease or extensive stage disease. In other embodiments the disclosed conjugated antibodies will be administered to refractory patients (i.e., those whose disease recurs during or shortly after completing a course of initial therapy); sensitive patients (i.e., those whose relapse is longer than 2-3 months after primary therapy); or patients exhibiting resistance to a platinum based agent (e.g. carboplatin, cisplatin, oxaliplatin) and/or a taxane (e.g. docetaxel, paclitaxel, larotaxel or cabazitaxel). In certain preferred embodiments the DLL3 ADCs of the instant invention may be administered to frontline patients (i.e., those who have not been treated for lung cancer). In other embodiments the DLL3 ADCs of the instant invention may be administered to second line lung cancer patients. In still other embodiments the DLL3 ADCs of the instant invention may be administered to third or fourth line lung cancer patients.

[0511] In particularly preferred embodiments the disclosed ADCs may be used to treat small cell lung cancer. With regard to such embodiments the conjugated antibodies may be administered to patients exhibiting limited stage disease. In other embodiments the disclosed ADCs will be administered to patients exhibiting extensive stage disease. In other preferred embodiments the disclosed ADCs will be administered to refractory patients (i.e., those who recur during or shortly after completing a course of initial therapy) or recurrent small cell lung cancer patients. Still other embodiments comprise the administration of the disclosed ADCs to sensitive patients (i.e., those whose relapse is longer than 2-3 months after primary therapy for SCLC). In each case it will be appreciated that compatible ADCs may be used in combination with other anti-cancer agents (e.g., platinum based agents or taxanes or antibodies to PD-1 or PD-L1) depending the selected dosing regimen and the clinical diagnosis.

[0512] As set forth herein the disclosed ADCs may further be used to prevent, treat or diagnose tumors with neuroendocrine features or phenotypes including neuroendocrine tumors. True or canonical neuroendocrine tumors (NETs) arising from the dispersed endocrine system are relatively rare, with an incidence of 2-5 per 100,000 people, but highly aggressive. Neuroendocrine tumors occur in the kidney, genitourinary tract (bladder, prostate, ovary, cervix, and endometrium), gastrointestinal tract (colon, stomach), thyroid (medullary thyroid cancer), and lung (small cell lung carcinoma and large cell neuroendocrine carcinoma). These tumors may secrete several hormones including serotonin and/or chromogranin A that can cause debilitating symptoms known as carcinoid syndrome. Such tumors can be denoted by positive immunohistochemical markers such as neuron-specific enolase (NSE, also known as gamma enolase, gene symbol=ENO2), CD56 (or NCAM1), chromogranin A (CHGA), and synaptophysin (SYP) or by genes known to exhibit elevated expression such as ASCL1. Unfortunately traditional chemotherapies have not been particularly effective in treating NETs and liver metastasis is a common outcome.

[0513] While the disclosed ADCs may be advantageously used to treat neuroendocrine tumors they may also be used to treat, prevent or diagnose pseudo neuroendocrine tumors (pNETs) that genotypically or phenotypically mimic, resemble or exhibit common traits with canonical neuroendocrine tumors. Pseudo neuroendocrine tumors or tumors that exhibit neuroendocrine features are tumors that arise from cells of the diffuse neuroendocrine system or from cells in which a neuroendocrine differentiation cascade has been aberrantly reactivated during the oncogenic process. Such pNETs commonly share certain phenotypic or biochemical characteristics with traditionally defined neuroendocrine tumors (i.e., they exhibit neuroendocrine features), including the ability to produce subsets of biologically active amines, neurotransmitters, and peptide hormones. Histologically, such tumors (NETs and pNETs) share a common appearance often showing densely connected small cells with minimal cytoplasm of bland cytopathology and round to oval stippled nuclei. For the purposes of the instant invention commonly expressed histological markers or genetic markers that may be used to define neuroendocrine and pseudo neuroendocrine tumors include, but are not limited to, chromogranin A, CD56, synaptophysin, PGP9.5, ASCL1 and neuron-specific enolase (NSE).

[0514] Accordingly the ADCs of the instant invention may beneficially be used to treat both pseudo neuroendocrine tumors and canonical neuroendocrine tumors. In this regard the ADCs may be used as described herein to treat neuroendocrine tumors (both NET and pNET) arising in the kidney, genitourinary tract (bladder, prostate, ovary, cervix, and endometrium), gastrointestinal tract (colon, stomach), thyroid (medullary thyroid cancer), and lung (small cell lung carcinoma and large cell neuroendocrine carcinoma). Moreover, the ADCs of the instant invention may be used to treat tumors expressing one or more markers selected from the group consisting of NSE, CD56, synaptophysin, chromogranin A, ASCL1 and PGP9.5 (UCHL1). That is, the present invention may be used to treat a subject suffering from a tumor that is NSE or CD56⁺ or PGP9.5⁺ or ASCL1⁺ or SYR⁺ or CHGA⁺ or some combination thereof.

[0515] As previously alluded to the DLL3 ADCs of the invention may be used to treat SCLC patients with progressive disease after one or two treatments (i.e., second or third line SCLC patients) particularly if they exhibit the aforementioned markers.

[0516] With regard to hematologic malignancies it will be further be appreciated that the compounds and methods of the present invention may be particularly effective in treating a variety of B-cell lymphomas, including low grade/NHL follicular cell lymphoma (FCC), mantle cell lymphoma (MCL), diffuse large cell lymphoma (DLCL), small lymphocytic (SL) NHL, intermediate grade/follicular NHL, intermediate grade diffuse NHL, high grade immunoblastic NHL, high grade lymphoblastic NHL, high grade small non-cleaved cell NHL, bulky disease NHL, Waldenstrom's Macroglobulinemia, lymphoplasmacytoid lymphoma (LPL), mantle cell lymphoma (MCL), follicular lymphoma (FL), diffuse large cell lymphoma (DLCL), Burkitt's lymphoma (BL), AIDS-related lymphomas, monocytic B cell lymphoma, angioimmunoblastic lymphoadenopathy, small lymphocytic, follicular, diffuse large cell, diffuse small cleaved cell, large cell immunoblastic lymphoblastoma, small, non-cleaved, Burkitt's and non-Burkitt's, follicular, predominantly large cell; follicular, predominantly small cleaved cell; and follicular, mixed small cleaved and large cell lymphomas. See, Gaidono et al., “Lymphomas”, IN CANCER: PRINCIPLES & PRACTICE OF ONCOLOGY, Vol. 2: 2131-2145 (DeVita et al., eds., 5.sup.th ed. 1997). It should be clear to those of skill in the art that these lymphomas will often have different names due to changing systems of classification, and that patients having lymphomas classified under different names may also benefit from the combined therapeutic regimens of the present invention.

### IX. ARTICLES OF MANUFACTURE

[0517] The invention includes pharmaceutical packs and kits comprising one or more containers or receptacles, wherein a container can comprise one or more doses of an antibody or ADC of the invention. Such kits or packs may be diagnostic or therapeutic in nature. In certain embodiments, the pack or kit contains a unit dosage, meaning a predetermined amount of a composition comprising, for example, an antibody or ADC of the invention, with or without one or more additional agents and optionally, one or more anti-cancer agents. In certain other embodiments, the pack or kit contains a detectable amount of an anti-DLL3 antibody or ADC, with or without an associated reporter molecule and optionally one or more additional agents for the detection, quantitation, staining and/or visualization of cancerous cells.

[0518] In any event kits of the invention will generally comprise an antibody or ADC of the invention in a suitable container or receptacle comprising a pharmaceutically acceptable formulation and, optionally, one or more anti-cancer agents in the same or different containers. The kits may also contain other pharmaceutically acceptable formulations or devices, either for diagnosis or combination therapy. Examples of diagnostic devices or instruments include those that can be used to detect, interrogate, monitor, quantify or profile cells or markers associated with proliferative disorders (for a list of such exemplary markers, see above). In some embodiments the devices may be used to detect, monitor and/or quantify circulating tumor cells either in vivo or in vitro (see, for example, WO 2012/0128801). In still other embodiments the circulating tumor cells may comprise tumorigenic cells. The kits contemplated by the invention can also contain appropriate reagents to combine the antibody or ADC of the invention with an anti-cancer agent or diagnostic agent.

[0519] When the components of the kit are provided in one or more liquid solutions, the liquid solution can be non-aqueous, though typically an aqueous solution is preferred, with a sterile aqueous solution being particularly preferred. The formulation in the kit can also be provided as dried powder(s) or in lyophilized form that can be reconstituted upon addition of an appropriate liquid. The liquid used for reconstitution can be contained in a separate container. Such liquids can comprise sterile, pharmaceutically acceptable buffer(s) or other diluent(s) such as bacteriostatic water for injection, sterile water for injection, phosphate-buffered saline, Ringer's solution or dextrose solution. Where the kit comprises the antibody or ADC of the invention in combination with additional therapeutics or agents, the solution may be pre-mixed, either in a molar equivalent combination, or with one component in excess of the other. Alternatively, the antibody or ADC of the invention and any optional anti-cancer agent or other agent can be maintained separately within distinct containers prior to administration to a patient.

[0520] In certain preferred embodiments kits of the invention will comprise vials or bottles containing a lyophilized DLL3 ADC. Preferably the lyophilized ADC will comprise a DLL3 ADC selected from the group consisting of ADC1, ADC2, ADC3, ADC4, ADC5 and ADC6 and more preferably the lyophilized DLL3 ADC will comprise hSC16.56DL1 or hSC16.56ss1DL6. In certain embodiments the lyophilized DLL3 ADC will further comprise a lyoprotectant. In other aspects the kits may optionally comprise a container comprising an aqueous solution that may be used to reconstitute the lyophilized DLL3 ADC. In still other embodiments the kits may comprise an insert or instructions indicating that the lyophilized DLL3 remains stable for 3 months, 6 months, 1 year, 18 months, 2 years, 30 months or three years at 2-8° C. (e.g., 4 CC). In selected preferred embodiments the insert or instructions will indicate that the lyophilized ADC will remain stable for two years at 2-8° C. (e.g., 4 CC). In certain preferred embodiments the aforementioned kits comprising the lyophilized DLL3 ADC will comprise a label, marker, package insert, bar code and/or reader indicating that the kit contents may be used for the treatment, prevention and/or diagnosis of cancer. In a particularly preferred aspect the label, marker, package insert, bar code and/or reader indicates that the kit contents may be used for the treatment, prevention and/or diagnosis of small cell lung cancer. In other particularly preferred aspects the label, marker, package insert, bar code and/or reader indicates that the kit contents may be used for the treatment, prevention and/or diagnosis of large cell neuroendocrine carcinoma, melanoma, thyroid cancer or glioblastoma.

[0521] More generally the kit can comprise one or multiple containers or receptacles and a label or package insert in, on or associated with the container(s), indicating that the enclosed composition is used for diagnosing or treating the disease condition of choice (e.g., cancer). Suitable containers include, for example, bottles, vials, syringes, infusion bags (IV bags), etc. The containers can be formed from a variety of materials such as glass or pharmaceutically compatible plastics. In certain embodiments the container(s) can comprise a sterile access port such as, for example, an intravenous solution bag or a vial having a stopper that can be pierced by a hypodermic injection needle.

[0522] In some embodiments the kit can contain a means by which to administer the antibody and any optional components to a patient, e.g., one or more needles or syringes (pre-filled or empty), an eye dropper, pipette, or other such like apparatus, from which the formulation may be injected or introduced into the subject or applied to a diseased area of the body. The kits of the invention will also typically include a means for containing the vials, or such like, and other components in close confinement for commercial sale, such as, e.g., blow-molded plastic containers into which the desired vials and other apparatus are placed and retained.

### X. MISCELLANEOUS

[0523] Unless otherwise defined herein, scientific and technical terms used in connection with the invention shall have the meanings that are commonly understood by those of ordinary skill in the art. Further, unless otherwise required by context, singular terms shall include pluralities and plural terms shall include the singular. In addition, ranges provided in the specification and appended claims include both end points and all points between the end points. Therefore, a range of 2.0 to 3.0 includes 2.0, 3.0, and all points between 2.0 and 3.0.

[0524] Generally, techniques of cell and tissue culture, molecular biology, immunology, microbiology, genetics and chemistry described herein are those well-known and commonly used in the art. The nomenclature used herein, in association with such techniques, is also commonly used in the art. The methods and techniques of the invention are generally performed according to conventional methods well known in the art and as described in various references that are cited throughout the present specification unless otherwise indicated.

### XI. REFERENCES

[0525] The complete disclosure of all patents, patent applications, and publications, and electronically available material (including, for example, nucleotide sequence submissions in, e.g., GenBank and RefSeq, and amino acid sequence submissions in, e.g., SwissProt, PIR, PRF, PBD, and translations from annotated coding regions in GenBank and RefSeq) cited herein are incorporated by reference, regardless of whether the phrase “incorporated by reference” is or is not used in relation to the particular reference. The foregoing detailed description and the examples that follow have been given for clarity of understanding only. No unnecessary limitations are to be understood therefrom. The invention is not limited to the exact details shown and described. Variations obvious to one skilled in the art are included in the invention defined by the claims. Any section headings used herein are for organizational purposes only and are not to be construed as limiting the subject matter described.

### XII. SEQUENCES

[0526] Appended to the instant application are figures and a sequence listing comprising a number of nucleic acid and amino acid sequences. The following Table 4 provides a summary of the included sequences.

TABLE 4

| SEQ ID NO. | Description |
|---|---|
| 1 | DLL3 isoform 1 protein |
| 2 | DLL3 isoform 2 protein |
| 3 | Epitope protein - SC16.23 |
| 4 | Epitope protein - SC16.34 & SC 16.56 |
| 5 | Kappa constant region protein |
| 6 | IgG1 constant region protein |
| 7 | hSC16.56 full length heavy chain protein |
| 8 | hSC16.56 and hSC16.56ss1 full length light chain prot. |
| 9 | hSC16.56ss1 full length heavy chain protein |
| 10-19 | Reserved |
| 20 | SC16.3 VL DNA (aligned with encoded protein) |
| 21 | SC16.3 VL protein |
| 22 | SC16.3 VH DNA (aligned with encoded protein) |
| 23 | SC16.3 VH protein |
| 24-387 | Additional murine clones as in SEQ ID NOs: 20-23 |
| 388-407 | Humanized clones as in SEQ ID NOs: 20-23 |
| 408, 409, 410 | hSC16.13 CDRL1, CDRL2, CDRL3 |
| 411, 412, 413 | hSC16.13 CDRH1, CDRH2, CDRH3 |
| 414, 415, 416 | hSC16.15 CDRL1, CDRL2, CDRL3 |
| 417, 418, 419 | hSC16.15 CDRH1, CDRH2, CDRH3 |
| 420, 421, 422 | hSC16.25 CDRL1, CDRL2, CDRL3 |
| 423, 424, 425 | hSC16.25 CDRH1, CDRH2, CDRH3 |
| 426, 427, 428 | hSC16.34 CDRL1, CDRL2, CDRL3 |
| 429, 430, 431 | hSC16.34 CDRH1, CDRH2, CDRH3 |
| 432, 433, 434 | hSC16.56 CDRL1, CDRL2, CDRL3 |
| 435, 436, 437 | hSC16.56 CDRH1, CDRH2, CDRH3 |

[0527] As discussed in Example 2 below, Table 4 above may further be used to designate SEQ ID NOS for exemplary Kabat CDRs delineated in FIGS. 1A and 1B. More particularly FIGS. 1A and 1B denote the three Kabat CDRs of each heavy (CDRH) and light (CDRL) chain variable region sequence and Table 4 above provides for assignment of a SEQ ID designation that may be applied to each CDRL1, CDRL2 and CDRL3 of the light chain and each CDRH1, CDRH2 and CDRH3 of the heavy chain. Using this methodology each unique CDR set forth in FIGS. 1A and 1B may be assigned a sequential SEQ ID NO and can be used to provide the derived antibodies of the instant invention.

### XIII. TUMOR LISTING

[0528] PDX tumor cell types are denoted by an abbreviation followed by a number, which indicates the particular tumor cell line. The passage number of the tested sample is indicated by p0-p# appended to the sample designation where p0 is indicative of an unpassaged sample obtained directly from a patient tumor and p# is indicative of the number of times the tumor has been passaged through a mouse prior to testing. As used herein, the abbreviations of the tumor types and subtypes are shown in Table 5 as follows:

TABLE 5

| Tumor Type | Abbreviation | Tumor subtype | Abbreviation |
|---|---|---|---|
| Breast | BR | | |
| | | estrogen receptor positive and/or | BR-ERPR |
| | | progesterone receptor positive | |
| | | ERBB2/Neu positive | BR-ERBB2/Neu |
| | | HER2 positive | BR-HER2 |
| | | triple-negative | TNBC |
| | | claudin subtype of triple-negative | TNBC-CLDN |
| colorectal | CR | | |
| endometrial | EN | | |
| gastric | GA | | |
| | | diffuse adenocarcinoma | GA-Ad-Dif/Muc |
| | | intestinal adenocarcinoma | GA-Ad-Int |
| | | stromal tumors | GA-GIST |
| glioblastoma | GB | | |
| head and neck | HN | | |
| kidney | KDY | | |
| | | clear renal cell carcinoma | KDY-CC |
| | | papillary renal cell carcinoma | KDY-PAP |
| | | transitional cell or urothelial | KDY-URO |
| | | carcinoma | |
| | | unknown | KDY-UNK |
| liver | LIV | | |
| | | hepatocellular carcinoma | LIV-HCC |
| | | cholangiocarcinoma | LIV-CHOL |
| lymphoma | LN | | |
| lung | LU | | |
| | | adenocarcinoma | LU-Ad |
| | | carcinoid | LU-CAR |
| | | large cell neuroendocrine | LU-LCC |
| | | non-small cell | NSCLC |
| | | squamous cell | LU-SCC |
| | | small cell | SCLC |
| | | spindle cell | LU-SPC |
| melanoma | MEL | | |
| ovarian | OV | | |
| | | clear cell | OV-CC |
| | | endometroid | OV-END |
| | | mixed subtype | OV-MIX |
| | | malignant mixed mesodermal | OV-MMMT |
| | | mucinous | OV-MUC |
| | | neuroendocrine | OV-NET |
| | | papillary serous | OV-PS |
| | | serous | OV-S |
| | | small cell | OV-SC |
| | | transitional cell carcinoma | OV-TCC |
| pancreatic | PA | | |
| | | acinar cell carcinoma | PA-ACC |
| | | duodenal carcinoma | PA-DC |
| | | mucinous adenocarcinoma | PA-MAD |
| | | neuroendocrine | PA-NET |
| | | adenocarcinoma | PA-PAC |
| | | adenocarcinoma exocrine type | PA-PACe |
| | | ductal adenocarcinoma | PA-PDAC |
| | | ampullary adenocarcinoma | PA-AAC |
| prostate | PR | | |
| skin | SK | | |
| | | melanoma | MEL |
| | | squamous cell carcinomas | SK-SCC |

### EXAMPLES

[0529] The invention, thus generally described above, will be understood more readily by reference to the following examples, which are provided by way of illustration and are not intended to be limiting of the instant invention. The examples are not intended to represent that the experiments below are all or the only experiments performed. Unless indicated otherwise, parts are parts by weight, molecular weight is weight average molecular weight, temperature is in degrees Centigrade, and pressure is at or near atmospheric.

### Example 1

### Generation of Murine Anti-DLL3 Antibodies

[0530] Anti-DLL3 murine antibodies were produced as follows. In a first immunization campaign, three mice (one from each of the following strains: Balb/c, CD-1, FVB) were inoculated with human DLL3-fc protein (hDLL3-Fc) emulsified with an equal volume of TiterMax® or alum adjuvant. The hDLL3-Fc fusion construct was purchased from Adipogen International (Catalog No. AG-40A-0113). An initial immunization was performed with an emulsion of 10 μg hDLL3-Fc per mouse in TiterMax. Mice were then boosted biweekly with 5 μg hDLL3-Fc per mouse in alum adjuvant. The final injection prior to fusion was with 5 μg hDLL3-Fc per mouse in PBS.

[0531] In a second immunization campaign six mice (two each of the following strains: Balb/c, CD-1, FVB), were inoculated with human DLL3-His protein (hDLL3-His), emulsified with an equal volume of TiterMax® or alum adjuvant. Recombinant hDLL3-His protein was purified from the supernatants of CHO-S cells engineered to overexpress hDLL3-His. The initial immunization was with an emulsion of 10 μg hDLL3-His per mouse in TiterMax. Mice were then boosted biweekly with 5 μg hDLL3-His per mouse in alum adjuvant. The final injection was with 2×10⁵ HEK-293T cells engineered to overexpress hDLL3.

[0532] Solid-phase ELISA assays were used to screen mouse sera for mouse IgG antibodies specific for human DLL3. A positive signal above background was indicative of antibodies specific for DLL3. Briefly, 96 well plates (VWR International, Cat. #610744) were coated with recombinant DLL3-His at 0.5 μg/ml in ELISA coating buffer overnight. After washing with PBS containing 0.02% (v/v) Tween 20, the wells were blocked with 3% (w/v) BSA in PBS, 200 μL/well for 1 hour at room temperature (RT). Mouse serum was titrated (1:100, 1:200, 1:400, and 1:800) and added to the DLL3 coated plates at 50 μL/well and incubated at RT for 1 hour. The plates are washed and then incubated with 50 μL/well HRP-labeled goat anti-mouse IgG diluted 1:10,000 in 3% BSA-PBS or 2% FCS in PBS for 1 hour at RT. Again the plates were washed and 40 μL/well of a TMB substrate solution (Thermo Scientific 34028) was added for 15 minutes at RT. After developing, an equal volume of 2N H₂SO₄ was added to stop substrate development and the plates were analyzed by spectrophotometer at OD 450.

[0533] Sera-positive immunized mice were sacrificed and draining lymph nodes (popliteal, inguinal, and medial iliac) were dissected and used as a source for antibody producing cells. Cell suspensions of B cells (approximately 229×10⁶ cells from the hDLL3-Fc immunized mice, and 510×10⁶ cells from the hDLL3-His immunized mice) were fused with non-secreting P3×63Ag8.653 myeloma cells at a ratio of 1:1 by electro cell fusion using a model BTX Hybrimmune System (BTX Harvard Apparatus). Cells were re-suspended in hybridoma selection medium consisting of DMEM medium supplemented with azaserine, 15% fetal clone I serum, 10% BM Condimed (Roche Applied Sciences), 1 mM nonessential amino acids, 1 mM HEPES, 100 IU penicillin-streptomycin, and 50 μM 2-mercaptoethanol, and were cultured in four T225 flasks in 100 mL selection medium per flask. The flasks were placed in a humidified 37° C. incubator containing 5% CO₂ and 95% air for six to seven days.

[0534] On day six or seven after the fusions the hybridoma library cells were collected from the flasks and plated at one cell per well (using the FACSAria I cell sorter) in 200 μL of supplemented hybridoma selection medium (as described above) into 64 Falcon 96-well plates, and 48 96-well plates for the hDLL3-His immunization campaign. The rest of the library was stored in liquid nitrogen.

[0535] The hybridomas were cultured for 10 days and the supernatants were screened for antibodies specific to hDLL3 using flow cytometry performed as follows. 1×10⁵ per well of HEK-293T cells engineered to overexpress human DLL3, mouse DLL3 (pre-stained with dye), or cynomolgus DLL3 (pre-stained with Dylight800) were incubated for 30 minutes with 25 μL hybridoma supernatant. Cells were washed with PBS/2% FCS and then incubated with 25 μL per sample DyeLight 649 labeled goat-anti-mouse IgG, Fc fragment specific secondary diluted 1:300 in PBS/2% FCS. After a 15 minute incubation cells were washed twice with PBS/2% FCS and re-suspended in PBS/2% FCS with DAPI and analyzed by flow cytometry for fluorescence exceeding that of cells stained with an isotype control antibody. Remaining unused hybridoma library cells were frozen in liquid nitrogen for future library testing and screening.

[0536] The hDLL3-His immunization campaign yielded approximately 50 murine anti-hDLL3 antibodies and the hDLL3-Fc immunization campaign yielded approximately 90 murine anti-hDLL3 antibodies.

### Example 2

### Sequencing of Anti-DLL3 Antibodies

[0537] Based on the foregoing, a number of exemplary distinct monoclonal antibodies that bind immobilized human DLL3 or h293-hDLL3 cells with apparently high affinity were selected for sequencing and further analysis. Sequence analysis of the light chain variable regions and heavy chain variable regions from selected monoclonal antibodies generated in Example 1 confirmed that many had novel complementarity determining regions and often displayed novel VDJ arrangements.

[0538] Initially selected hybridoma cells expressing the desired antibodies were lysed in Trizol® reagent (Trizol® Plus RNA Purification System, Life Technologies) to prepare the RNA encoding the antibodies. Between 10⁴ and 10⁵ cells were re-suspended in 1 mL Trizol and shaken vigorously after addition of 200 μL chloroform. Samples were then centrifuged at 4° C. for 10 minutes and the aqueous phase was transferred to a fresh microfuge tube and an equal volume of 70% ethanol was added. The sample was loaded on an RNeasy Mini spin column, placed in a 2 mL collection tube and processed according to the manufacturer's instructions. Total RNA was extracted by elution, directly to the spin column membrane with 100 μL RNase-free water. The quality of the RNA preparations was determined by fractionating 3 μL in a 1% agarose gel before being stored at −80° C. until used.

[0539] The variable region of the Ig heavy chain of each hybridoma was amplified using a 5′ primer mix comprising 32 mouse specific leader sequence primers designed to target the complete mouse VH repertoire in combination with a 3′ mouse Cy primer specific for all mouse Ig isotypes. Similarly, a primer mix containing thirty two 5′ Vκ leader sequences designed to amplify each of the Vκ mouse families was used in combination with a single reverse primer specific to the mouse kappa constant region in order to amplify and sequence the kappa light chain. For antibodies containing a lambda light chain, amplification was performed using three 5′ VL leader sequences in combination with one reverse primer specific to the mouse lambda constant region. The VH and VL transcripatients were amplified from 100 ng total RNA using the Qiagen One Step RT-PCR kit as follows. A total of eight RT-PCR reactions were run for each hybridoma, four for the Vκ light chain and four for the Vγ heavy chain. PCR reaction mixtures included 3 μL of RNA, 0.5 μL of 100 μM of either heavy chain or kappa light chain primers (custom synthesized by Integrated Data Technologies), 5 μL of 5×RT-PCR buffer, 1 μL dNTPs, 1 μL of enzyme mix containing reverse transcriptase and DNA polymerase, and 0.4 μL of ribonuclease inhibitor RNasin (1 unit). The thermal cycler program was RT step 50° C. for 30 minutes, 95° C. for 15 minutes followed by 30 cycles of (95° C. for 30 seconds, 48° C. for 30 seconds, 72° C. for 1 minute). There was then a final incubation at 72° C. for 10 minutes.

[0540] The extracted PCR products were sequenced using the same specific variable region primers as described above for the amplification of the variable regions. To prepare the PCR products for direct DNA sequencing, they were purified using the QIAquick™ PCR Purification Kit (Qiagen) according to the manufacturer's protocol. The DNA was eluted from the spin column using 50 μL of sterile water and then sequenced directly from both strands (MCLAB).

[0541] Selected nucleotide sequences were analyzed using the IMGT sequence analysis tool (http://www.imgt.org/IMGTmedical/_sequence_analysis.html) to identify germline V, D and J gene members with the highest sequence homology. These derived sequences were compared to known germline DNA sequences of the Ig V- and J-regions by alignment of VH and VL genes to the mouse germline database using a proprietary antibody sequence database.

[0542] FIG. 1A depicts the contiguous amino acid sequences of numerous novel murine light chain variable regions from anti-DLL3 antibodies and exemplary humanized light chain variable regions derived from the variable light chains of representative murine anti-DLL3 antibodies (as per Example 3 below). FIG. 1B depicts the contiguous amino acid sequences of novel murine heavy chain variable regions from the same anti-DLL3 antibodies and humanized heavy chain variable regions derived from the same murine antibodies providing the humanized light chains (as per Example 3 below). Murine light and heavy chain variable region amino acid sequences are provided in SEQ ID NOS: 21-387, odd numbers while humanized light and heavy chain variable region amino acid sequences are provided in SEQ ID NOS: 389-407, odd numbers.

[0543] Thus, taken together FIGS. 1A and 1B provide the annotated sequences of numerous murine anti-DLL3 binding or targeting domains, termed SC16.3, SC16.4, SC16.5, SC16.7, SC16.8, SC16.10, SC16.11, SC16.13, SC16.15, SC16.18, SC16.19, SC16.20, SC16.21, SC16.22, SC16.23, SC16.25, SC16.26, SC16.29, SC16.30, SC16.31, SC16.34, SC16.35, SC16.36, SC16.38, SC16.41, SC16.42, SC16.45, SC16.47, SC16.49, SC16.50, SC16.52, SC16.55, SC16.56, SC16.57, SC16.58, SC16.61, SC16.62, SC16.63, SC16.65, SC16.67, SC16.68, SC16.72, SC16.73, SC16.78, SC16.79, SC16.80, SC16.81, SC16.84, SC16.88, SC16.101, SC16.103, SC16.104, SC16.105, SC16.106, SC16.107, SC16.108, SC16.109, SC16.110, SC16.111, SC16.113, SC16.114, SC16.115, SC16.116, SC16.117, SC16.118, SC16.120, SC16.121, SC16.122, SC16.123, SC16.124, SC16.125, SC16.126, SC16.129, SC16.130, SC16.131, SC16.132, SC16.133, SC16.134, SC16.135, SC16.136, SC16.137, SC16.138, SC16.139, SC16.140, SC16.141, SC16.142, SC16.143, SC16.144, SC16.147, SC16.148, SC16.149 and SC16.150 and humanized antibodies, termed hSC16.13, hSC16.15, hSC16.25, hSC16.34 and hSC16.56.

[0544] In particular aspects of the invention the ADC binding domain binds specifically to hDLL3 and comprises or competes for binding with an antibody comprising: a light chain variable region (VL) of SEQ ID NO: 21 and a heavy chain variable region (VH) of SEQ ID NO: 23; or a VL of SEQ ID NO: 25 and a VH of SEQ ID NO: 27; or a VL of SEQ ID NO: 29 and a VH of SEQ ID NO: 31; or a VL of SEQ ID NO: 33 and a VH of SEQ ID NO: 35; or a VL of SEQ ID NO: 37 and a VH of SEQ ID NO: 39; or a VL of SEQ ID NO: 41 and a VH of SEQ ID NO: 43; or a VL of SEQ ID NO: 45 and a VH of SEQ ID NO: 47; or a VL of SEQ ID NO: 49 and a VH of SEQ ID NO: 51; or a VL of SEQ ID NO: 53 and a VH of SEQ ID NO: 55; or a VL of SEQ ID NO: 57 and a VH of SEQ ID NO: 59; or a VL of SEQ ID NO: 61 and a VH of SEQ ID NO: 63; or a VL of SEQ ID NO: 65 and a VH of SEQ ID NO: 67; or a VL of SEQ ID NO: 69 and a VH of SEQ ID NO: 71; or a VL of SEQ ID NO: 73 and a VH of SEQ ID NO: 75; or a VL of SEQ ID NO: 77 and a VH of SEQ ID NO: 79; or a VL of SEQ ID NO: 81 and a VH of SEQ ID NO: 83; or a VL of SEQ ID NO: 85 and a VH of SEQ ID NO: 87; or a VL of SEQ ID NO: 89 and a VH of SEQ ID NO: 91; or a VL of SEQ ID NO: 93 and a VH of SEQ ID NO: 95; or a VL of SEQ ID NO: 97 and a VH of SEQ ID NO: 99; or a VL of SEQ ID NO: 101 and a VH of SEQ ID NO: 103; or a VL of SEQ ID NO: 105 and a VH of SEQ ID NO: 107; or a VL of SEQ ID NO: 109 and a VH of SEQ ID NO: 111; or a VL of SEQ ID NO: 113 and a VH of SEQ ID NO: 115; or a VL of SEQ ID NO: 117 and a VH of SEQ ID NO: 119; or a VL of SEQ ID NO: 121 and a VH of SEQ ID NO: 123; or a VL of SEQ ID NO: 125 and a VH of SEQ ID NO: 127; or a VL of SEQ ID NO: 129 and a VH of SEQ ID NO: 131; or a VL of SEQ ID NO: 133 and a VH of SEQ ID NO: 135; or a VL of SEQ ID NO: 137 and a VH of SEQ ID NO: 139; or a VL of SEQ ID NO: 141 and a VH of SEQ ID NO: 143; or a VL of SEQ ID NO: 145 and a VH of SEQ ID NO: 147; or a VL of SEQ ID NO: 149 and a VH of SEQ ID NO: 151; or a VL of SEQ ID NO: 153 and a VH of SEQ ID NO: 155; or a VL of SEQ ID NO: 157 and a VH of SEQ ID NO: 159; or a VL of SEQ ID NO: 161 and a VH of SEQ ID NO: 163; or a VL of SEQ ID NO: 165 and a VH of SEQ ID NO: 167; or a VL of SEQ ID NO: 169 and a VH of SEQ ID NO: 171; or a VL of SEQ ID NO: 173 and a VH of SEQ ID NO: 175; or a VL of SEQ ID NO: 177 and a VH of SEQ ID NO: 179; or a VL of SEQ ID NO: 181 and a VH of SEQ ID NO: 183; or a VL of SEQ ID NO: 185 and a VH of SEQ ID NO: 187; or a VL of SEQ ID NO: 189 and a VH of SEQ ID NO: 191; or a VL of SEQ ID NO: 193 and a VH of SEQ ID NO: 195; or a VL of SEQ ID NO: 197 and a VH of SEQ ID NO: 199; or a VL of SEQ ID NO: 201 and a VH of SEQ ID NO: 203; or a VL of SEQ ID NO: 205 and a VH of SEQ ID NO: 207; or a VL of SEQ ID NO: 209 and a VH of SEQ ID NO: 211; or a VL of SEQ ID NO: 213 and a VH of SEQ ID NO: 215; or a VL of SEQ ID NO: 217 and a VH of SEQ ID NO: 219; or a VL of SEQ ID NO: 221 and a VH of SEQ ID NO: 223; or a VL of SEQ ID NO: 225 and a VH of SEQ ID NO: 227; or a VL of SEQ ID NO: 229 and a VH of SEQ ID NO: 231; or a VL of SEQ ID NO: 233 and a VH of SEQ ID NO: 235; or a VL of SEQ ID NO: 237 and a VH of SEQ ID NO: 239; or a VL of SEQ ID NO: 241 and a VH of SEQ ID NO: 243; or a VL of SEQ ID NO: 245 and a VH of SEQ ID NO: 247; or a VL of SEQ ID NO: 249 and a VH of SEQ ID NO: 251; or a VL of SEQ ID NO: 253 and a VH of SEQ ID NO: 255; or a VL of SEQ ID NO: 257 and a VH of SEQ ID NO: 259; or a VL of SEQ ID NO: 261 and a VH of SEQ ID NO: 263; or a VL of SEQ ID NO: 265 and a VH of SEQ ID NO: 267; or a VL of SEQ ID NO: 269 and a VH of SEQ ID NO: 271; or a VL of SEQ ID NO: 273 and a VH of SEQ ID NO: 275; or a VL of SEQ ID NO: 277 and a VH of SEQ ID NO: 279; or a VL of SEQ ID NO: 281 and a VH of SEQ ID NO: 283; or a VL of SEQ ID NO: 285 and a VH of SEQ ID NO: 287; or a VL of SEQ ID NO: 289 and a VH of SEQ ID NO: 291; or a VL of SEQ ID NO: 293 and a VH of SEQ ID NO: 295; or a VL of SEQ ID NO: 297 and a VH of SEQ ID NO: 299; or a VL of SEQ ID NO: 301 and a VH of SEQ ID NO: 303; or a VL of SEQ ID NO: 305 and a VH of SEQ ID NO: 307; or a VL of SEQ ID NO: 309 and a VH of SEQ ID NO: 311; or a VL of SEQ ID NO: 313 and a VH of SEQ ID NO: 315; or a VL of SEQ ID NO: 317 and a VH of SEQ ID NO: 319; or a VL of SEQ ID NO: 321 and a VH of SEQ ID NO: 323; or a VL of SEQ ID NO: 325 and a VH of SEQ ID NO: 327; or a VL of SEQ ID NO: 329 and a VH of SEQ ID NO: 331; or a VL of SEQ ID NO: 333 and a VH of SEQ ID NO: 335; or a VL of SEQ ID NO: 337 and a VH of SEQ ID NO: 339; or a VL of SEQ ID NO: 341 and a VH of SEQ ID NO: 343; or a VL of SEQ ID NO: 345 and a VH of SEQ ID NO: 347; or a VL of SEQ ID NO: 349 and a VH of SEQ ID NO: 351; or a VL of SEQ ID NO: 353 and a VH of SEQ ID NO: 355; or a VL of SEQ ID NO: 357 and a VH of SEQ ID NO: 359; or a VL of SEQ ID NO: 361 and a VH of SEQ ID NO: 363; or a VL of SEQ ID NO: 365 and a VH of SEQ ID NO: 367; or a VL of SEQ ID NO: 369 and a VH of SEQ ID NO: 371; or a VL of SEQ ID NO: 373 and a VH of SEQ ID NO: 375; or a VL of SEQ ID NO: 377 and a VH of SEQ ID NO: 379; or a VL of SEQ ID NO: 381 and a VH of SEQ ID NO: 383; or a VL of SEQ ID NO: 385 and a VH of SEQ ID NO: 387; or a VL of SEQ ID NO: 389 and a VH of SEQ ID NO: 391; or a VL of SEQ ID NO: 393 and a VH of SEQ ID NO: 395; or a VL of SEQ ID NO: 397 and a VH of SEQ ID NO: 399; or a VL of SEQ ID NO: 401 and a VH of SEQ ID NO: 403; or a VL of SEQ ID NO: 405 and a VH of SEQ ID NO: 407.

[0545] For the purposes of the instant application the SEQ ID NOS of each particular antibody are sequential odd numbers. Thus the monoclonal anti-DLL3 antibody, SC16.3, comprises amino acid SEQ ID NOS: 21 and 23 for the light and heavy chain variable regions respectively; SC16.4 comprises SEQ ID NOS: 25 and 27; SC16.5 comprises SEQ ID NOS: 29 and 31, and so on. The corresponding nucleic acid sequence for each antibody amino acid sequence is included in the appended sequence listing and has the SEQ ID NO immediately preceding the corresponding amino acid SEQ ID NO. Thus, for example, the SEQ ID NOS of the VL and VH of the SC16.3 antibody are 21 and 23, respectively, and the SEQ ID NOS of the nucleic acid sequences encoding the VL and VH of the SC16.3 antibody are SEQ ID NOS: 20 and 22, respectively. The CDRs in FIGS. 1A and 1B are defined as per Kabat et al. (supra) using a proprietary version of the Abysis database.

### Example 3

### Generation of Chimeric and Humanized Anti-DLL3 Antibodies

[0546] To provide a benchmark for humanized binding domains compatible with the instant invention chimeric anti-DLL3 antibodies were generated using art-recognized techniques as follows. Total RNA was extracted from the hybridomas and amplified as set forth in Example 1. Data regarding V, D and J gene segments of the VH and VL chains of the murine antibodies were obtained from the derived nucleic acid sequences. Primer sets specific to the leader sequence of the VH and VL chain of the antibody were designed using the following restriction sites: AgeI and XhoI for the VH fragments, and XmaI and DraIII for the VL fragments. PCR products were purified with a QIAquick PCR purification kit (Qiagen), followed by digestion with restriction enzymes AgeI and XhoI for the V_{H} fragments and XmaI and DraIII for the VL fragments. The VL and VH digested PCR products were purified and ligated into kappa CL (SEQ ID NO: 5) human light chain constant region expression vector or IgG1 (SEQ ID NO: 6) human heavy chain constant region expression vector, respectively.

[0547] Ligation reactions were performed in a total volume of 10 μL with 200U T4-DNA Ligase (New England Biolabs), 7.5 μL of digested and purified gene-specific PCR product and 25 ng linearized vector DNA. Competent E. coli DH10B bacteria (Life Technologies) were transformed via heat shock at 42° C. with 3 μL ligation product and plated onto plates with ampicillin at a concentration of 100 μg/mL. Following purification and digestion of the amplified ligation products, the V_{H} fragment was cloned into the AgeI-XhoI restriction sites of the pEE6.4HulgG1 expression vector (Lonza) and the VL fragment was cloned into the XmaI-DraIII restriction sites of the pEE12.4Hu-Kappa expression vector (Lonza Ltd.).

[0548] Chimeric antibodies were expressed by co-transfection of HEK-293T cells with pEE6.4HulgG1 and pEE12.4Hu-Kappa expression vectors. Prior to transfection the HEK-293T cells were cultured in 150 mm plates under standard conditions in Dulbecco's Modified Eagle's Medium (DMEM) supplemented with 10% heat inactivated FCS, 100 μg/mL streptomycin and 100 U/mL penicillin G. For transient transfections cells were grown to 80% confluency. 12.5 μg each of pEE6.4HulgG1 and pEE12.4Hu-Kappa vector DNA were added to 50 μL HEK-293T transfection reagent in 1.5 mL Opti-MEM. The mix was incubated for 30 minutes at room temperature and plated. Supernatants were harvested three to six days after transfection. Culture supernatants containing recombinant chimeric antibodies were cleared from cell debris by centrifugation at 800×g for 10 minutes and stored at 4° C. Recombinant chimeric antibodies were purified by Protein A affinity chromatography.

[0549] The same murine anti-DLL3 antibodies (e.g. SC16.13, SC16.15, SC16.25, SC16.34 and SC16.56) were also used to derive CDR-grafted or humanized binding domains. The murine antibodies were humanized using a proprietary computer-aided CDR-grafting method (Abysis Database, UCL Business) and standard molecular engineering techniques as follows. Human framework regions of the variable regions were designed based on the highest homology between the framework sequences and CDR canonical structures of human germline antibody sequences and the framework sequences and CDRs of the relevant mouse antibodies. For the purpose of the analysis the assignment of amino acids to each of the CDR domains was done in accordance with Kabat et al. Once the variable regions were selected, they were generated from synthetic gene segments (Integrated DNA Technologies). Humanized antibodies were cloned and expressed using the molecular methods described above for chimeric antibodies.

[0550] The genetic composition for the selected human acceptor variable regions are shown in Table 6 immediately below for each of the humanized antibodies. The sequences depicted in Table 6 correspond to the contiguous variable region sequences set forth in SEQ ID NOS: 389 and 391 (hSC16.13), SEQ ID NOS: 393 and 395 (hSC16.15), SEQ ID NOS: 397 and 399 (hSC16.25), SEQ ID NOS: 401 and 403 (hSC16.34) and SEQ ID NOS: 405 and 407 (hSC16.56). Table 6 shows that no framework changes or back mutations were necessary to maintain the favorable binding properties of the selected antibodies.

TABLE 6

| | | | human | FW | | human | FW |
|---|---|---|---|---|---|---|---|
| mAb | human VH | human DH | JH | changes | human VK | JK | changes |
| hSC16.13 | IGHV2- | IGHD1-1 | JH6 | None | IGKV1- | JK1 | None |
| | 5*01 | | | | 39*01 | | |
| hSC16.15 | IGHV1- | IGHD2-2 | JH4 | None | IGKV1- | JK4 | None |
| | 46*01 | | | | 13*02 | | |
| hSC16.25 | IGHV2- | IGHD3-16 | JH6 | None | IGKV6- | JK2 | None |
| | 5*01 | | | | 21*01 | | |
| hSC16.34 | IGHV1- | IGHD3-22 | JH4 | None | IGKV1- | JK1 | None |
| | 3*02 | | | | 27*01 | | |
| hSC16.56 | IGHV1- | IGHD2-21 | JH4 | None | IGKV3- | JK2 | None |
| | 18*01 | | | | 15*01 | | |

[0551] Although no residues were altered in the framework regions, in one of the humanized clones (hSC16.13) mutations were introduced into heavy chain CDR2 to address stability concerns. The binding affinity of the antibody with the modified CDR was checked to ensure that it was equivalent to either the corresponding chimeric or murine antibody.

[0552] Following humanization the resulting VL and VH chain amino acid sequences were analyzed to determine their homology with regard to the murine donor and human acceptor light and heavy chain variable regions. The results shown in Table 7, immediately below, reveal that the humanized constructs consistently exhibited a higher homology with respect to the human acceptor sequences than with the murine donor sequences. The murine heavy and light chain variable regions show a similar overall percentage homology to a closest match of human germline genes (85%-93%) compared with the homology of the humanized antibodies and the donor hybridoma protein sequences (74%-83%).

TABLE 7

| | Homology to Human | Homology to Murine Parent |
|---|---|---|
| mAb | (CDR acceptor) | (CDR donor) |
| hSC16.13 HC | 93% | 81% |
| hSC16.13 LC | 87% | 77% |
| hSC16.15 HC | 85% | 83% |
| hSC16.15 LC | 85% | 83% |
| hSC16.25 HC | 91% | 83% |
| hSC16.25 LC | 85% | 79% |
| hSC16.34 HC | 87% | 79% |
| hSC16.34 LC | 85% | 81% |
| hSC16.56 HC | 87% | 74% |
| hSC16.56 LC | 87% | 76% |

[0553] As with the chimeric antibodies the humanized VL and VH digested PCR products were purified and ligated into kappa CL (SEQ ID NO: 5) human light chain constant region expression vector or IgG1 (SEQ ID NO: 6) human heavy chain constant region expression vector, respectively. Following expression each of the derived humanized constructs were analyzed using surface plasmon resonance, to determine if the CDR grafting process had appreciably altered their apparent affinity for DLL3 protein. The humanized constructs were compared with chimeric antibodies comprising the murine parent (or donor) heavy and light chain variable domains and a human constant region substantially equivalent to that used in the humanized constructs. The humanized anti-DLL3 antibodies exhibited binding characteristics roughly comparable to those shown by the chimeric parent antibodies (data not shown).

### Example 4

### Generation of Site Specific Antibodies

[0554] An engineered human IgG1/kappa anti-DLL3 site-specific antibody was constructed comprising a native light chain (LC) constant region and heavy chain (HC) constant region, wherein cysteine 220 (C220) in the upper hinge region of the HC, which forms an interchain disulfide bond with cysteine 214 (C214) in the LC, was substituted with serine (C220S). When assembled the HCs and LCs form an antibody comprising two free cysteines that are suitable for conjugation to a therapeutic agent. Unless otherwise noted, all numbering of constant region residues is in accordance with the EU numbering scheme as set forth in Kabat et al.

[0555] The engineered antibodies were generated as follows. An expression vector encoding the full-length humanized anti-DLL3 antibody hSC16.56 was used as a template for PCR amplification and site directed mutagenesis. Site directed mutagenesis was performed using the Quickchange® system (Agilent Technologies) according to the manufacturer's instructions.

[0556] The vector encoding the mutant C220S heavy chain of hSC16.56 was co-transfected with the native full-length kappa light chain in CHO-S cells and expressed using a mammalian transient expression system. The engineered anti-DLL3 site-specific antibody containing the C220S mutant was termed hSC16.56ss1 (SEQ ID NOS: 8 and 9). Once expressed the engineered anti-DLL3 antibodies were characterized by SDS-PAGE to confirm that the correct mutants had been generated. SDS-PAGE was conducted on a pre-cast 10% Tris-Glycine mini gel from life technologies in the presence and absence of a reducing agent such as DTT (dithiothreitol). Following electrophoresis, the gels were stained with a colloidal Coomassie solution. Under reducing conditions, two bands corresponding to the free LCs and free HCs, were observed (data not shown). This pattern is typical of IgG molecules in reducing conditions. Under non-reducing conditions, the band patterns were different from native IgG molecules, indicative of the absence of a disulfide bond between the HC and LC. A band around 98 kD corresponding to the HC-HC dimer was observed. In addition, a faint band corresponding to the free LC and a predominant band around 48 kD that corresponded to a LC-LC dimer was observed. The formation of some amount of LC-LC species is expected due to the free cysteines on the C-terminus of each LC.

### Example 5

### Domain and Epitope Mapping of Anti-DLL3 Antibodies

[0557] In order to characterize and position the epitopes that the disclosed anti-DLL3 antibodies bind to, domain-level epitope mapping was performed using a modification of the protocol described by Cochran et al., 2004 (supra). Individual domains of DLL3 comprising specific amino acid sequences were expressed on the surface of yeast, and binding by each anti-DLL3 antibody was determined through flow cytometry.

[0558] Yeast display plasmid constructs were created for the expression of the following constructs: DLL3 extracellular domain (amino acids 27-466); DLL1-DLL3 chimera, which consists of the N-terminal region and DSL domain of DLL1 (amino acids 22-225) fused to EGF-like domains 1 through 6 of DLL3 (amino acids 220-466); DLL3-DLL1 chimera, which consists of the N-terminal region and DSL domain of DLL3 (amino acids 27-214) fused to EGF-like domains 1 through 8 of DLL1 (amino acids 222-518); EGF1 (amino acids 215-249); EGF2 (amino acids 274-310); EGF1 and EGF2 (amino acids 215-310); EGF3 (amino acids 312-351); EGF4 (amino acids 353-389); EGF5 (amino acids 391-427); and EGF6 (amino acids 429-465). For domain information see generally UniProtKB/Swiss-Prot database entry Q9NYJ7. Note that the amino acid numbering references an unprocessed DLL3 protein with a leader sequence included in the sequence set forth in SEQ ID NO. 1.) For analysis of the N-terminal region or the EGF domains as a whole, chimeras with the family member DLL1 (DLL1-DLL3 and DLL3-DLL1) were used as opposed to fragments to minimize potential problems with protein folding. Domain-mapped antibodies had previously been shown not to cross-react with DLL1 indicating that any binding to these constructs was occurring through association with the DLL3 portion of the construct. These plasmids were transformed into yeast, which were then grown and induced as described in Cochran et al.

[0559] To test for binding to a particular construct, 200,000 induced yeast cells expressing the desired construct were washed twice in PBS+1 mg/mL BSA (PBSA), and incubated in 50 μL of PBSA with biotinylated anti-HA clone 3F10 (Roche Diagnostics) at 0.1 μg/mL and either 50 nM purified antibody or 1:2 dilution of unpurified supernatant from hybridomas cultured for 7 days. Cells were incubated for 90 minutes on ice, followed by two washes in PBSA. Cells were then incubated in 50 μL PBSA with the appropriate secondary antibodies: for murine antibodies, Alexa 488 conjugated streptavidin, and Alexa 647 conjugated goat anti mouse (Life Technologies) were added at 1 μg/mL each; and for humanized or chimeric antibodies, Alexa 647 conjugated streptavidin (Life Technologies) and R-phycoerythrin conjugated goat anti human (Jackson Immunoresearch) were added at 1 μg/mL each. After a twenty minute incubation on ice, cells were washed twice with PBSA and analyzed on a FACS Canto II. Antibodies that bound to DLL3-DLL1 chimera were designated as binding to the N-terminal region+DSL. Antibodies that bound specifically to an epitope present on a particular EGF-like domain were designated as binding to its respective domain (FIG. 2.)

[0560] In order to classify an epitope as conformational (e.g., discontinuous) or linear, yeast displaying the DLL3 ECD was heat treated for 30 minutes at 80° C. to denature the DLL3 ECD, and then washed twice in ice-cold PBSA. The ability of anti-DLL3 antibodies to bind the denatured yeast was tested by FACS using the same staining protocol as described above. Antibodies that bound to both the denatured and native yeast were classified as binding to a linear epitope, whereas antibodies that bound native yeast but not denatured yeast were classified as conformationally specific.

[0561] A schematic summary of the domain-level epitope mapping data of the antibodies tested is presented in FIG. 2, with antibodies binding a linear epitope underlined and, where determined, the corresponding bin noted in parenthesis. A review of FIG. 2 shows that the majority of anti-DLL3 antibodies tended to map to epitopes found either in the N-terminal/DSL region of DLL3 or EGF2. FIG. 2 presents similar data in a tabular form on bin determination and domain mapping for various anti-DLL3 antibodies.

[0562] Fine epitope mapping was further performed on selected antibodies using one of two methods. The first method employed the Ph.D.-12 phage display peptide library kit (New England Biolabs) which was used in accordance with the manufacturer's instructions. The antibody for epitope mapping was coated overnight at 50 μg/mL in 3 mL 0.1 M sodium bicarbonate solution, pH 8, onto a Nunc MaxiSorp tube (Nunc). The tube was blocked with 3% BSA solution in bicarbonate solution. Then, 10¹¹ input phage in PBS+0.1% Tween-20 was allowed to bind, followed by ten consecutive washes with 0.1% Tween-20 to wash away non-binding phage. Remaining phage were eluted with 1 mL 0.2 M glycine for 10 minutes at room temperature with gentle agitation, followed by neutralization with 150 μL 1M Tris-HCl pH 9. Eluted phage were amplified and panned again with 10¹¹ input phage, using 0.5% Tween-20 during the wash steps to increase selection stringency. DNA from 24 plaques of the eluted phage from the second round was isolated using the Qiaprep M13 Spin kit (Qiagen) and sequenced. Binding of clonal phage was confirmed using an ELISA assay, where the mapped antibody or a control antibody was coated onto an ELISA plate, blocked, and exposed to each phage clone. Phage binding was detected using horseradish peroxidase conjugated anti-M13 antibody (GE Healthcare), and the 1-Step Turbo TMB ELISA solution (Pierce). Phage peptide sequences from specifically binding phage were aligned using Vector NTI (Life Technologies) against the antigen ECD peptide sequence to determine the epitope of binding.

[0563] Alternatively, a yeast display method (Chao et al., 2007, PMID: 17406305) was used to map the epitopes of selected antibodies. Libraries of DLL3 ECD mutants were generated with error prone PCR using nucleotide analogues 8-oxo-2′deoxyguanosine-5′-triphosphate and 2′-deoxy-p-nucleoside-5′triphosphate (TriLink Bio) for a target mutagenesis rate of one amino acid mutation per clone. These were transformed into a yeast display format. Using the technique described above for domain-level mapping, the library was stained for HA and antibody binding at 50 nM. Using a FACS Aria (BD), clones that exhibited a loss of binding compared to wild type DLL3 ECD were sorted. These clones were re-grown, and subjected to another round of FACS sorting for loss of binding to the target antibody. Using the Zymoprep Yeast Plasmid Miniprep kit (Zymo Research), individual ECD clones were isolated and sequenced. Where necessary, mutations were reformatted as single-mutant ECD clones using the Quikchange site directed mutagenesis kit (Agilent).

[0564] Individual ECD clones were next screened to determine whether loss of binding was due to a mutation in the epitope, or a mutation that caused misfolding. Mutations that involved cysteine, proline, and stop codons were automatically discarded due to the high likelihood of a misfolding mutation. Remaining ECD clones were then screened for binding to a non-competing, conformationally specific antibody. ECD clones that lost binding to non-competing, conformationally specific antibodies were concluded to contain misfolding mutations, whereas ECD clones that retained equivalent binding to wild type DLL3 ECD were concluded to be properly folded. Mutations in the ECD clones in the latter group were concluded to be in the epitope.

[0565] A summary of selected antibodies with their derived epitopes comprising amino acid residues that are involved in antibody binding are listed in Table 8 below. Antibodies SC16.34 and SC16.56 interact with common amino acid residues which is consistent with the binning information and domain mapping results shown in FIG. 2. Moreover, SC16.23 was found to interact with a distinct contiguous epitope and was found not to bin with SC16.34 or SC16.56. Note that for the purposes of the appended sequence listing SEQ ID NO: 4 comprises a placeholder amino acid at position 204.

TABLE 8

| Antibody Clone | Epitope | SEQ ID NO: |
|---|---|---|
| SC16.23 | Q93, P94, G95, A96, P97 | 3 |
| SC16.34 | G203, R205, P206 | 4 |
| SC16.56 | G203, R205, P206 | 4 |

### Example 6

### Conjugation of Anti-DLL3 Antibodies to Pyrrolobenzodiazepines (PBDs)

[0566] A humanized anti-DLL3 antibody (hSC16.56) and a humanized site-specific anti-DLL3 antibody (hSC16.56ss1) were conjugated to pyrrolobenzodiazepine drug linkers (DL1 and DL6 respectively, each comprising PBD1) via a terminal maleimido moiety with a free sulfhydryl group to create the ADCs termed hSC16.56DL1 and hSC16.56ss1DL6. hSC16.56PDL1 (i.e., SC16LD6.5) and hSC16.56ss1 DL6 were made under GMP conditions as it was intended for use in clinical trials.

[0567] The humanized DLL3 (hSC16.56) antibody drug conjugates (ADCs) were prepared in two distinct stages; a reduction step and a conjugation step to conjugate PBD1 (DL1) to hSC16.56. The ADCs were then processed through Cation Exchange (CEX) Chromatography, followed by diafiltration and formulation steps to produce the drug substance. The process is described in detail below.

[0568] The antibodies were adjusted to pH 7.5 with the addition of 200 mM Tris Base, 32 mM EDTA pH 8.5. Cysteine bonds of the pH adjusted DLL3 antibodies were then partially reduced with a pre-determined molar addition of mol tris(2-carboxyethyl)-phosphine (TCEP) per mol antibody for 90 min. at 20° C. The resulting partially reduced preparations were then conjugated to PBD1 (as set forth above) via a maleimide linker for a minimum of 30 minutes at 20° C. The reaction was then quenched with the addition of excess N-acetyl cysteine (NAC) compared to linker-drug using a 10 mM stock solution prepared in water. After a minimum quench time of 20 minutes the pH was adjusted to 5.5 with the addition of 0.5 M acetic acid. Preparations of the ADCs were then processed through Cation Exchange (CEX) Chromatography in a bind and elute mode with a step elution to remove aggregates formed during the conjugation step. CEX purified ADCs were then buffer exchanged into diafiltration buffer by diafiltration using a 30 kDa membrane. The dialfiltered anti-DLL3 ADC was then formulated with sucrose and polysorbate-20 to the target final concentration to produce drug substance.

[0569] The site specific humanized anti-DLL3 (hSC16.56ss1) ADCs were conjugated to DL6 using a modified partial reduction process. In this respect the desired product is an ADC that is maximally conjugated on the unpaired cysteine (C214) on each LC constant region and that minimizes ADCs having a drug to antibody ratio (DAR) which is greater than 2 (DAR>2) while maximizing ADCs having a DAR of 2 (DAR=2). In order to further improve the specificity of the conjugation, the antibodies were selectively reduced using a process comprising a stabilizing agent (e.g. L-arginine) and a mild reducing agent (e.g. glutathione) prior to conjugation with the linker-drug. The ADCs were then processed through preparative Hydrophobic Interaction Chromatography (HIC), followed by a diafiltration and formulation step to produce the drug substance. The process is described in detail below.

[0570] The site-specific antibody constructs were partially reduced in a buffer containing 1M L-arginine/5 mM EDTA with a pre-determined concentration of reduced glutathione (GSH), pH 8.0 for a minimum of two hours at room temperature. All preparations were then buffer exchanged into a 20 mM Tris/3.2 mM EDTA, pH 7.0 buffer using a 30 kDa membrane to remove the reducing buffer. The resulting partially reduced preparations were then conjugated to PBD1 (DL6 as set forth above) via a maleimide linker for a minimum of 30 mins. at 20° C. The reaction was then quenched with the addition of excess NAC compared to linker-drug using a 10 mM stock solution prepared in water. After a minimum quench time of 20 minutes the pH was adjusted to 6.0 with the addition of 0.5 M acetic acid. The pH adjusted ADCs were then processed through preparative Hydropobic Interaction Chromatography (HIC) (Butyl Sepharose FF) in a bind and elute mode with a step elution to further purify the DAR 2 species. The purified ADCs were then buffer exchanged into diafiltration buffer by diafiltration using a 30 kDa membrane. The dialfiltered anti-DLL3 ADC was then formulated with sucrose and polysorbate-20 to the target final concentration to produce the site-specific drug substance.

### Example 7

### Immunohistochemistry

[0571] Immunohistochemistry (IHC) was performed on primary human tumor tissue sections to assess the expression and location of DLL3 in tumor cells.

[0572] In order to identify an IHC-compatible anti-DLL3 antibody, IHC was performed on HEK293T parental cell pellets or DLL3-expressing HEK293T cell pellets using numerous anti-DLL3 antibodies of the invention. Several murine anti-DLL3 antibodies (including SC16.65) were able to specifically detect DLL3-overexpressing HEK293T cell pellets more effectively than other anti-DLL3 antibodies of the invention that were tested (data not shown). The ability of these antibodies to specifically detect DLL3 was confirmed by a competition experiment in which the relevant anti-DLL3 antibody was mixed with a 5× molar ratio excess of hDLL3-His protein and then incubated with DLL3-expressing HEK293T formalin fixed and paraffin embedded (FFPE) sections. The absence of positive staining demonstrated that the hDLL3-His protein interfered with the binding of the anti-DLL3 antibody to the DLL3-overexpressing HEK293T cells (data not shown).

[0573] IHC was performed, as described below, on formalin fixed and paraffin embedded (FFPE) tissues as is standard in the art. Planar sections of tissues were cut and mounted on glass microscope slides. After xylene de-paraffinization 5 μm sections were pre-treated with Antigen Retrieval Solution (Dako) for 20 mins. at 99° C., cooled to 75° C. and then treated with 0.3% hydrogen peroxide in PBS followed by Avidin/Biotin Blocking Solution (Vector Laboratories). FFPE slides were then blocked with 10% horse serum in 3% BSA in PBS buffer and incubated with a primary anti-DLL3 antibody of the invention, diluted to 10 μg/ml in 3% BSA/PBS, for 30 mins. at room temperature. The FFPE slides were then incubated with biotin-conjugated horse anti-mouse antibody (Vector Laboratories), diluted to 2.5 μg/ml in 3% BSA/PBS, for 30 mins. at room temperature followed by incubation in streptavidin-HRP (ABC Elite Kit; Vector Laboratories). FFPE slides of primary human tumors were then incubated in biotinyl tyramide followed by incubation in streptavidin-HRP following manufacturers' instruction from the TSA amplification kit (TSA Amplification Kit; Perkin Elmer). Chromogenic detection was developed with 3,3′-diaminobenzidine (Thermo Scientific) for 5 mins. at room temperature and tissues were counterstained with Meyer's hematoxylin (IHC World), washed with alcohol and immersed in xylene. PDX tumors did not receive the TSA amplification. Sections were then viewed by brightfield microscopy and DLL3 membranous expression on tumor epithelium was noted by H-score. The H-score is obtained by the formula: 3×percentage of strongly staining membranous surface+2×percentage of moderately staining membranous surface+percentage of weakly staining membranous surface, giving a range of 0 to 300. Results of the studies are shown in FIGS. 3A and 3B.

[0574] FIGS. 3A and 3B graphically depict the expression of DLL3 protein vs overall survival (OS) and in limited vs extensive SCLC tumors (FIG. 3A) or in naïve and chemorefractory SCLC tumors. An examination of FIG. 3A shows that DLL3 expression is not indicative of overall survival (in patients treated with prior art standard of care agents) and that both limited SCLC tumors and extensive SCLC tumors express varying levels of DLL3. Unlike melanoma, where DLL3 expression has been inversely correlated with patient survival, DLL3 expression in tumors exhibiting neuroendocrine features does not appear indicative of mortality with regard to standard of care therapies. Similarly FIG. 3B demonstrates that DLL3 expression levels are approximately the same both naïve and with standard of care treated tumors. FIG. 3B further shows empirically derived DLL3 H-scores of approximately 90 (dashed line) and 180 (solid line) on a 300 point scale. Other DLL3 H-scores between 90 and 180 (e.g., 120) were also derived (not shown). These H-scores was examined in accordance with the Phase I trial described in Example 8 and were found to be indicative of patients that may respond favorably to treatment with the DLL3 ADCs of the instant invention. Accordingly in one embodiment a patient to be treated with the DLL3 ADCs of the instant invention will have a DLL3 H-score of at least 90. In other embodiments a patient to be treated with the DLL3 ADCs of the instant invention will have a DLL3 H-score of at least 120. In yet other embodiments a patient to be treated with the DLL3 ADCs of the instant invention will have a DLL3 H-score of at least 150 and more preferably will have a DLL3 H-score of at least 180. For the purposes of the instant disclosure any tumor exhibiting a DLL3 H-score of 90 or greater (or, as discussed above, where ≥10% of the constituent cells express DLL3) shall be considered DLL3+ and potentially treatable with the disclosed compounds and compositions.

[0575] Note that in other studies an H-score with a 200 point scale was also developed. In such 200 H-score scales an H-score of 120 is approximately equivalent to an H-score of 180 on a 300 H-score scale. In both cases (e.g., 120/200 or 180/300) such H-scores may be classified as biomarker positive (BM+) or DLL3+ (i.e., they are both above an H-score of 90 on a 300 point scale and/or ≥10% of the constituent cells express DLL3) and are suggestive of patients that may respond favorably to the treatment methods of the instant invention.

### Example 8

### SC16.56PBD1 (SC16LD6.5) Study Overview and Results

[0576] A Phase I clinical study was conducted to explore the possibility of using the disclosed DLL3-targeted ADCs to treat patients with recurrent small cell lung cancer (SCLC) and large cell neuroendocrine carcinoma (LCNEC). A summary of the clinical trial is provided in FIG. 4A.

[0577] Background:

[0578] Rovalpituzumab tesirine (i.e. Rova-T, SC16LD6.5, hSC16.56PBD1 or hSC16.56DL1 described herein) is a Delta-like protein 3 (DLL3) targeted antibody-drug conjugate (ADC) comprised of a humanized monoclonal antibody, dipeptide linker, and pyrrolobenzodiazepine (PBD) dimer toxin with a drug-to-antibody ratio of 2. SC16LD6.5 may be prepared substantially as set forth in Example 6 under GMP conditions. DLL3 is highly expressed in human neuroendocrine tumors and their tumor-initiating cells, including approximately two-thirds of SCLC and LCNEC tumors. DLL3 protein is not expressed at detectable levels in normal tissues. Rovalpituzumab tesirine induced tumor regression and prolonged time to progression significantly outperforming cisplatin/etoposide in DLL3-expressing SCLC and LCNEC patient-derived xenograft (PDX) tumor models. Based on this promising activity, a first-in-human phase I trial (NCT01901653) in patients with recurrent SCLC was initiated and preliminary results are reported below.

[0579] Methods:

[0580] SCLC patients with progressive disease after 1 or 2 previous lines of therapy (i.e., second or third line patients) received escalating doses of rovalpituzumab tesirine as a single agent once every 3 weeks (Q3W) in 1-3 pt cohorts until dose limiting toxicities (DLTs) were observed. The doses were 0.05, 0.1, 0.2, 0.4 and 0.8 mg/kg Q3W. Midway through accrual, pharmacokinetic data (FIG. 4B and as discussed in more detail in Example 9 below) revealed a longer than expected ADC half-life of −11 days, prompting evaluation of a Q6W schedule. As described in the previous Examples a DLL3 antibody was developed and utilized to assess antigen expression in archived tumor specimens. For the purposes of this study biomarker positive (BM+) tumors were defined by IHC membrane-associated H-Scores 120 (on a 200 H-score scale).

[0581] Results:

[0582] 79 patients were treated: 34 Q3W and 45 Q6W; 33F/46M; median age, 61 years (44-81). Acute and chronic DLTs of thrombocytopenia and serosal effusions (according to a data monitoring committee comprised of experts mistakenly annotated by investigators in the Phase I trial as capillary leak syndrome, “CLS”) were observed at 0.8 and 0.4 mg/kg Q3W, respectively. Maximum tolerated doses (MTD) of 0.2 mg/kg Q3W×3 cycles and 0.3 mg/kg Q6W×2 cycles were further evaluated in expansion cohorts. The most common (≥20%) treatment emergent AEs of any grade among all patients were fatigue (47%), dyspnea (24%), nausea (24%), and decreased appetite (22%). The most common related treatment emergent SAEs were serosal effusions and thrombocytopenia, reported in 11 (14%) and 3 (4%) patients respectively (FIG. 4F).

[0583] Of 49 archived tumor specimens received from enrolled patients, 34 (69%) were DLL3 BM+. Among the 27 confirmed DLL3 BM+ patients treated at the MTDs, 11 patients (41%) had partial response (PR) and 12 patients (44%) achieved stable disease (SD) for a combined clinical benefit rate (CBR) of 85% (FIG. 4E). In all evaluable patients treated at the MTD without regard for DLL3 biomarker status (n=59), the ORR was 20% (n=12 PR) and SD 59% (n=35), for a CBR of 80% (FIG. 4D). Notably, all patients with PRs that were treated at the MTD, and those having the most durable clinical benefit (up to 569 days OS), were BM+. Similar response rates were observed among patients sensitive and refractory to first-line therapy and in the third-line setting where no standard-of-care currently exists.

[0584] Interestingly, despite similar overall exposure to the ADC, the 0.3 mg/kg Q6W×2 showed a superior duration of response when compared with the 0.2 mg/kg Q3W×3 cohort (FIG. 4C), averaging >175 days vs. 88 days, respectively. FIG. 4C further shows that the same 0.3 mg/kg Q6W×2 cohort had a better mean OS than the 0.2 mg/kg Q3W×3 cohort.

[0585] Conclusions:

[0586] Rovalpituzumab tesirine (Rova-T), a first-in-class DLL3-targeted ADC, has manageable toxicity and demonstrated significant anti-tumor activity (41% ORR and 80% CBR) as a single agent in second- and third-line patients with recurrent DLL3 BM+ SCLC.

### Example 9

### SC16.56PBD1 (SC16LD6.5) Pharmacokinetics

[0587] As alluded to in the previous Example the pharmacokinetics (PK) of SC16LD6.5 was assessed in the Phase 1a/1b clinical trial described above. The concentration of SC16LD6.5 in human serum was assessed following administration of a pre-specified dose of SC16LD6.5 to patients with SCLC or LCNEC. Blood samples for serum levels were collected from all subjects entered into study immediately prior to their first dose of SC16LD6.5 and at multiple time points on Day 1 (Day 1 being the day of infusion). Additional blood for serum measurements were drawn once each on Days 2, 3, 5, 8, and 15 of Cycle 1. In cycles 2 and 3, blood was taken immediately pre (trough) and post (peak) infusion on Day 1. At or near estimated steady-state (Cycle 4), additional samples were collected on Day 1, 8 and 15. Following blood collection, specimens were processed to serum and frozen.

[0588] The serum concentration of SC16LD6.5 was measured in an enzyme linked immunosorbent assay (ELISA) with chemilumenescent detection on a mesoscale discovery (MSD) platform. This assay employed a pair of anti-idiopathic antibodies that specifically capture and detect SC16LD6.5 with one or more conjugated toxins. This assay cannot distinguish the number of toxin conjugates on SC16LD6.5. The concentration-time profile was generated based on these measured concentrations (FIG. 4B).

[0589] Based on the serum concentration of SC16LD6.5, the PK of SC16LD6.5 was estimated by noncompartmental analysis with the software package, Phoenix WinNonlin. PK was linear with dose-proportional increases in exposure. The terminal half-life was estimated by log-linear regression of the terminal phase of the concentration-time profile to determine the terminal rate coefficient (lambda). The quotient of the natural log of 2 and lambda was calculated to estimate the terminal half-life. The terminal half-life of SC16LD6.5 was estimated to be approximately 10.1 days following administration of 0.2 mg/kg of SC16LD6.5 every 3 weeks and approximately 12.1 days following administration of 0.3 mg/kg of SC16LD6.5 every 6 weeks. This estimated half-life exceeds that of other antibody-drug conjugates such as brentuximab vedotin and ado-trastuzumab emtansine. Such an unexpectedly long half-life allows for the achievement of a robust therapeutic index using the novel dosing regimens (e.g., 0.2 mg/kg Q3W×3 and 0.3 mg/kg Q6W×2).

### Example 10

### Anti-DLL3 ADC Lyophilization

[0590] In order to provide options for long-term storage and subsequent commercial activities, exemplary DLL3-ADCs of the instant invention were lyophilized. The lyophilized samples, stored in pharmaceutically compatible vials, were then used to conduct stability studies to determine the applicability of the technique to ADCs comprising PBDs. As the PBD drug linker conjugates are large and relatively hydrophobic, the ability to provide such lyophilized compositions that exhibit long-term stability was unclear.

[0591] For this study SC16LD6.5 antibody-drug conjugate preparations (prepared substantially as set forth in Example 6 above) were formulated at 10 mg/mL SC16LD6.5, 175 mM sucrose, 20 mM L-histidine hydrochloride (pH 6.0), and 0.4 mg/mL polysorbate 20. This exemplary formulation was chosen as suitable for long-term storage as a frozen liquid at the intended conditions of <−70° C. for Phase I/II clinical trials and potentially stable in lyophilized form under appropriate conditions. A lyophilized dosage form (30 mg/vial, approximately 3 mL in a 10-mL glass vial) intended for storage under refrigerated conditions (2-8° C.) using the identical formulation was developed for later clinical trials and potential commercial use.

[0592] The lyophilization process and conditions were derived using a development-scale lyophilizer. The process includes the following steps: freeze ramp, freeze hold, primary drying, and secondary drying. Using this process, a batch of lyophilized vials was produced in the equipment intended for production of clinical material. Following lyophilization, stoppered vials containing the powdered DLL3-ADCs were stored at different temperatures (5° C., 25° C. and 40° C.) for a prolonged period. At predetermined times selected vials were reconstituted and the resulting formulation analyzed for any material deviation from the starting formulation. Results of the analysis for time-points up to six months are shown in FIGS. 5A-5C.

[0593] A review of the data demonstrates that the lyophilized ADCs showed little degradation at any of the chosen temperatures. Accordingly lyophilized vials produced at the development-scale were demonstrated to be stable under real-time, stressed, and accelerated storage conditions.

### Example 11

### Combinations of Anti-DLL3 ADCs and Anti-PD-1 Antibodies Inhibit Small Cell Lung Cancer Tumor Growth In Vivo

[0594] As discussed above the DLL3 ADCs of the instant invention may be combined with anti-PD-1 antibodies to effectively treat various DLL3 expressing tumors. In order to demonstrate the therapeutic ability of the instant invention hSC16.56DL1 (Rova-T) was tested in combination with anti-PD-1 antibodies that inhibit the interaction between PD-1 and its ligand PDL1 in syngeneic in vivo models of small cell lung cancer (SCLC).

[0595] Rova-T is a DLL3-specific antibody-drug conjugate that, as demonstrated in this application, has shown activity against SCLC in a clinical setting. Antibodies directed against PD-1, which block the interaction between PD-1, which is mainly expressed on activated T cells and its ligands PD-L1 and PD-L2 have shown clinical utility in a number of cancer indications. Currently, the anti-PD-1 antibody drugs Opdivo® (nivolumab) and Keytruda® (pembrolizumab) are approved for use in certain patients with melanoma, non-small cell lung cancer (NSCLC), head and neck squamous cell carcinoma and Hodgkin's lymphoma but some activity has also been demonstrated in a subset of patients with SCLC. To determine whether Rova-T and anti PD-1 antibodies have inhibitive, neutral, additive or synergistic effects when used in combination their activities as single agents and in combination were tested in animal models of SCLC.

[0596] Since the mechanism of action of anti-PD-1 antibodies requires an immunocompetent host the DLL3 expressing mouse cell line KP1 in conjunction with immune compatible syngeneic mice was used. The KP1 cell line has been derived from spontaneous small cell lung cancer tumors found in the lungs of mice lacking the RB1 and TP53 genes (PMID: 21983857). Because Rova-T is capable of binding the human and murine DLL3 protein with comparable affinities and in vitro cytotoxic activity towards DLL3 expressing cells, the drug can be used in mouse models. But, as neither nivolumab nor pembrolizumab sufficiently interact with murine PD-1, an anti-mouse PD-1 surrogate antibody clone was selected. In this regard anti-mouse PD-1 antibody clone EH12.2H7 from BioLegend (San Diego, USA) has been shown to inhibit the interaction between PD-1 and PD-L1 similar to the anti-human antibodies used in clinical settings and to mimic their T cell enhancing and anti-cancer activities.

[0597] KP1 cells were grown as subcutaneous tumors in the flanks of B6129SF1/J mice (The Jackson Laboratory #101043, USA). Tumor volumes were measured twice weekly with calipers. When average tumor volumes were approximately 200 mm³, mice were randomized into cohorts of 5 mice each. By intraperitoneal injection, mice were treated with either SC16LD6.5 (“Rova-T”, 0.1 mg/kg, treatment Day 1 only) or HulgG1.DL1 (“HulgG1.PBD”, 0.5 mg/kg, treatment Day 1 only) and the same mice were also treated with either anti-mouse PD-1 antibody (“anti-PD-1”, 200 ug/mouse, treatment Days 1, 3, 7; BioLegend, USA) or Rat IgG2a antibody (“Rat IgG2a”, 200 ug/mouse, treatment days 1,3,7; BioLegend, USA). Tumor volumes continued to be measured twice weekly and mice were euthanized when tumor volumes exceeded 1500 mm³. The results of the study are shown in FIGS. 6A and 6B appended hereto.

[0598] As shown in FIG. 6A the combination of the anti-PD-1 antibody and the HuIgG1.PBD control does not significantly inhibit KP1 tumor growth. Similarly combinations of the Rat IgG2a (isotype control for anti-PD-1) with the HuIgG1.PBD control or Rova-T fail to substantially inhibit the growth of KP1 tumors in vivo, (FIG. 6A) for an appreciable time. While the delay was not extensive it will be appreciated that at these dosages Rova-T, essentially acting as a single agent, apparently showed some inhibition of tumor growth.

[0599] Likewise, as shown in FIG. 6B, the combination control treatments HulgG1.PBD+Rat IgG2a and HulgG1.PBD+anti-PD-1 did not substantially prolong the time before KP1 tumor volumes grew to exceed 300 mm³. Moreover, at the doses shown FIG. 6B the Rova-T+isotype control (Rat IgG2a) combination does not significantly inhibit KP1 tumor growth compared to treatment with HulgG1.PBD. While Rova-T (hSC16.56DL1) essentially acting as the sole active agent completely eliminates KP1 tumors at a dose of 0.5 mg/kg (data not shown), the relatively low dose of 0.1 mg/kg shows little effect against this tumor cell line.

[0600] In sharp contrast with the control combinations, treatment with Rova-T and with an anti-PD-1 antibody in combination produced a significant inhibition of KP1 tumor growth, in vivo, compared to treatment with either of the two active agents alone (FIGS. 6A and 6B). As shown in both FIG. 6A and FIG. 6B mean tumor growth is severely delayed. While all mice from combination control treatment groups had tumors larger than 300 mm³ after 17 days, only two of five (40%) combination group mice had tumors larger than 300 mm³ (FIG. 6B). Similarly FIG. 6A shows that the mean tumor volume in the mice treated with Rova-T and an anti-PD-1 antibody remained below 1000 mm³ for over twice as long as the Rova-T+isotype control treated mice. Moreover, the median percent tumor growth inhibition (the percent by which the smallest measured post-treatment tumor volume was smaller than the starting tumor volume) for the group treated with Rova-T+anti-PD-1 was 69%, compared to 0% for “HulgG1.PBD+Rat IgG2a”, 0% for “HuIgG1.PBD+anti-PD-1”, and 0% for “Rova-T+Rat IgG2a” treatment groups. This tumor growth inhibition data strongly suggests that the combination of a DLL3 ADC and an anti-PD-1 antibody may be synergistic in nature.

[0601] In any event the data set forth in this Example clearly show that the combination of DLL3 ADCs with anti-PD-1 antibodies demonstrate at least additive, if not synergistic, effects against SCLC by reducing tumor volumes and facilitating the long lasting survival of tumor bearing mice. The observed effect is specific and dependent on DLL3 recognition by Rova-T as treatment with an isotype PBD ADC in combination with PD-1 antibodies shows no improved efficacy towards the vehicle control. The measured effect is also, at least in part, due to PD-1 binding and inhibition as an isotype control Ab in combination with Rova-T fails to show the same results.

[0602] In summary, the data presented show that targeted cell killing of DLL3 expressing cancer by Rova-T may further enhance the effect of immunotherapy, including immunotherapy comprising the use of PD-1 and/or PD-L1 antibodies.

[0603] The complete disclosure of all patents, patent applications, and publications, and electronically available material (including, for example, nucleotide sequence submissions in, e.g., GenBank and RefSeq, and amino acid sequence submissions in, e.g., SwissProt, PIR, PRF, PBD, and translations from annotated coding regions in GenBank and RefSeq cited herein are incorporated by reference. The foregoing detailed description and examples have been given for clarity of understanding only. No unnecessary limitations are to be understood therefrom. The invention is not limited to the exact details shown and described, for variations obvious to one skilled in the art will be included within the invention defined by the claims.

1. A method of treating a subject having a tumor exhibiting a DLL3 H-score of at least 90 on a 300 point scale and/or ≥10% positively stained DLL3 cells comprising the step of administering a DLL3 ADC.

2. The method of claim 1 wherein the DLL3 ADC comprises cytotoxin selected from the group consisting of PBDs, calicheamicins, auristatins, maytansinoids and duocarmycins.

3. The method of claim 2 wherein the cytotoxin comprises a PBD.

4. The method of claim 3 wherein the PBD comprises PBD1.

5. The method of any one of claims 1-4 comprising a DLL3 ADC that binds to a tumor initiating cell expressing DLL3.

6. The method of any one of claims 1-5 wherein the DLL3 ADC comprises an antibody which is a chimeric, CDR grafted, human or humanized antibody, or a fragment thereof.

7. The method of claim 6 wherein the antibody is an internalizing antibody.

8. The method of any one of claims 1-7 wherein the tumor exhibits a DLL3 H-score of at least 120 on a 300 point scale.

9. The method of any one of claims 1-8 wherein the tumor exhibits a DLL3 H-score of at least 180 on a 300 point scale.

10. The method of any one of claims 1-9 wherein the tumor comprises a neuroendocrine tumor.

11. The method of any one of claims 1-10 wherein the tumor comprises a small cell lung cancer (SCLC) tumor.

12. The method of any one of claims 1-10 wherein the tumor comprises a large cell neuroendocrine cancer (LCNEC) tumor.

13. The method of any one of claims 1-12 wherein the tumor comprises a medullary thyroid cancer tumor.

14. The method of any one of claims 1-13 wherein the subject is treated with a DLL3 ADC regimen comprising a 0.2 mg/kg Q3W×3 dosing regimen.

15. The method of any one of claims 1-13 wherein the subject is treated with a DLL3 ADC regimen comprising a 0.3 mg/kg Q6W×2 dosing regimen.

16. The method of claim 14 or 15 wherein the subject is treated at progression following the DLL3 ADC regimen.

17. The method of claim 14 or 15 wherein the subject is shifted to a DLL3 ADC maintenance therapy following the DLL3 ADC regimen.

18. The method of any one of claims 1-17 wherein the subject is a front line patient.

19. The method of any one of claims 1-17 wherein the subject is a second line patient.

20. The method of any one of claims 1-17 wherein the subject is a third line patient.

21. The method of any one of claims 1-20 wherein the DLL3 ADC comprises SC16LD.5.

22. The method of any one of claims 1-20 wherein the DLL3 ADC comprises hSC16.56ss1DL6.

23. A method of treating a subject having a tumor comprising the steps of:
obtaining a sample of the tumor;
interrogating the tumor sample to calculate a DLL3 H-score and/or determine the percentage of positively stained DLL3 cells
treating the patient with a DLL3 ADC when the calculated DLL3 H-score is at least 90 on a 300 point scale and/or the positively stained DLL3 cells comprise ≥10% of the tumor cells.

24. The method of claim 23 wherein the interrogation step comprises immunohistochemistry.

25. A lyophilized composition comprising the antibody drug conjugate (ADC) of the formula Ab-[L-D]n or a pharmaceutically acceptable salt thereof wherein:
Ab comprises an anti-DLL3 antibody;
L comprises an optional linker;
D comprises a drug; and
n is an integer from 1 to 20.

26. The lyophilized composition of claim 25 wherein D comprises a PBD.

27. The lyophilized composition of claim 25 further comprising a pharmaceutically acceptable sugar.

28. The lyophilized composition of claim 26 wherein the ADC comprises SC16LD6.5.

29. The lyophilized composition of claim 26 wherein the ADC comprises hSC16.56ss1DL6.

30. An article of manufacture useful for diagnosing or treating DLL3 associated disorders comprising the composition of claim 25.

31. A method for treating cancer comprising the steps of:
reconstituting the lyophilized composition of claim 25 to provide a liquid pharmaceutical composition; and
administering the liquid pharmaceutical composition to a subject in need thereof.

32. The method of claim 31 wherein the cancer comprises a tumor exhibiting neuroendocrine features.

33. The method of claim 32, wherein the cancer comprises a neuroendocrine tumor

34. The method of claim 30 wherein the cancer comprises small cell lung cancer.

35. The method of claim 30 wherein the cancer comprises large cell neuroendocrine cancer.

36. An article of manufacture useful for diagnosing or treating DLL3 associated disorders comprising a receptacle comprising a lyophilized DLL3 ADC and associated with instructional materials for using said article of manufacture to treat or diagnose the DLL3 associated disorder.

37. The article of manufacture of claim 36 wherein said DLL3 ADC comprises a PBD.

38. A method of treating a subject having a tumor comprising the step of administering a DLL3 ADC having a terminal half-life of greater than about six days.

39. The method of claim 38 wherein said DLL3 ADC has a terminal half-life of greater than about seven days.

40. The method of claim 38 wherein said DLL3 ADC has a terminal half-life of greater than about eight days.

41. The method of claim 38 wherein said DLL3 ADC has a terminal half-life of greater than about nine days.

42. The method of claim 38 wherein said DLL3 ADC has a terminal half-life of greater than about 10 days.

43. The method of any one of claims 38-42 wherein the DLL3 ADC comprises cytotoxin selected from the group consisting of PBDs, calicheamicins, auristatins, maytansinoids and duocarmycins.

44. The method of claim 43 wherein the cytotoxin comprises a PBD.

45. The method of claim 44 wherein the PBD comprises PBD1.

46. The method of any one of claims 38-45 wherein the DLL3 ADC comprises an antibody which is a chimeric, CDR grafted, human or humanized antibody, or a fragment thereof.

47. The method of claim 46 wherein the antibody is an internalizing antibody.

48. The method of any one of claims 38-45 wherein the tumor comprises a tumor exhibiting neuroendocrine features.

49. The method of claim 46 wherein the tumor comprises a neuroendocrine tumor.

50. The method of any one of claims 38-47 wherein the tumor comprises a small cell lung cancer (SCLC) tumor.

51. The method of any one of claims 38-47 wherein the tumor comprises a large cell neuroendocrine cancer (LCNEC) tumor.

52. The method of any one of claims 38-51 wherein the subject is treated with a DLL3 ADC regimen comprising a 0.2 mg/kg Q3W dosing regimen.

53. The method of claim 52 wherein the subject is treated with a DLL3 ADC regimen comprising a 0.2 mg/kg Q3W×3 dosing regimen.

54. The method of any one of claims 38-51 wherein the subject is treated with a DLL3 ADC regimen comprising a 0.3 mg/kg Q6W dosing regimen.

55. The method of claim 54 wherein the subject is treated with a DLL3 ADC regimen comprising a 0.3 mg/kg Q6W×2 dosing regimen.

56. The method of claims 52 to 55 wherein the subject is treated at progression following the DLL3 ADC regimen.

57. The method of claims 52 to 55 wherein the subject is shifted to a DLL3 ADC maintenance therapy following the DLL3 ADC regimen.

58. The method of any one of claims 38-57 wherein the subject is a front line patient.

59. The method of any one of claims 38-57 wherein the subject is a second line patient.

60. The method of any one of claims 38-57 wherein the subject is a third line patient.

61. The method of any one of claims 38-60 wherein the DLL3 ADC comprises SC16LD.5.

62. The method of any one of claims 38-60 wherein the DLL3 ADC comprises hSC16.56ss1DL6.

63. A method of reducing the frequency of cancer stem cells in a subject in need thereof comprising the step of administering a DLL3 ADC having a terminal half-life of greater than about six days.

64. A DLL3 ADC comprising the following formula: [chemical structure]
wherein Ab comprises an anti-DLL3 antibody or immunoreactive fragment thereof.

65. The DLL3 ADC of claim 64 wherein the anti-DLL3 antibody comprises a site-specific antibody.

66. The DLL3 ADC of claim 64 wherein the anti-DLL3 antibody is hSC16.56ss1.

67. A method of reducing the frequency of cancer stem cells in a subject in need thereof comprising the steps of administering a DLL3 ADC and an anti-PD-1 antibody.

68. The method of claim 67 wherein the DLL3 ADC comprises SC16LD5

69. The method of claim 67 wherein the DLL3 ADC comprises hSC16.56551DL6.

70. A method of reducing the frequency of cancer stem cells in a subject in need thereof comprising the steps of administering a DLL3 ADC and an anti-PD-L1 antibody.

71. The method of claim 70 wherein the DLL3 ADC comprises SC16LD5

72. The method of claim 70 wherein the DLL3 ADC comprises hSC16.56ss1DL6.

73. A method of treating cancer in a subject in need thereof comprising the steps of administering a DLL3 ADC and an anti-PD-1 antibody.

74. The method of claim 73 wherein the DLL3 ADC comprises SC16LD5

75. The method of claim 73 wherein the DLL3 ADC comprises hSC16.56ss1DL6.

76. A method of treating cancer in a subject in need thereof comprising the steps of administering a DLL3 ADC and an anti-PD-L1 antibody.

77. The method of claim 76 wherein the DLL3 ADC comprises SC16LD5

78. The method of claim 76 wherein the DLL3 ADC comprises hSC16.56ss1DL6.

The application's sequence listing, which the Patent Office published only in electronic form, follows.

SEQUENCE LISTING (437 sequences)

SEQ ID NO: 1 - protein, 618 aa, Homo sapiens
MVSPRMSGLLSQTVILALIFLPQTRPAGVFELQIHSFGPGPGPGAPRSPCSARLPCRLFFRVCLKPGLSEEAAESPCALGAALSARGPVYTEQPGAPAPDLPLPDGLLQVPFRDAWPGTFSFIIETWREELGDQIGGPAWSLLARVAGRRRLAAGGPWARDIQRAGAWELRFSYRARCEPPAVGTACTRLCRPRSAPSRCGPGLRPCAPLEDECEAPLVCRAGCSPEHGFCEQPGECRCLEGWTGPLCTVPVSTSSCLSPRGPSSATTGCLVPGPGPCDGNPCANGGSCSETPRSFECTCPRGFYGLRCEVSGVTCADGPCFNGGLCVGGADPDSAYICHCPPGFQGSNCEKRVDRCSLQPCRNGGLCLDLGHALRCRCRAGFAGPRCEHDLDDCAGRACANGGTCVEGGGAHRCSCALGFGGRDCRERADPCAARPCAHGGRCYAHFSGLVCACAPGYMGARCEFPVHPDGASALPAAPPGLRPGDPQRYLLPPALGLLVAAGVAGAALLLVHVRRRGHSQDAGSRLLAGTPEPSVHALPDALNNLRTQEGSGDGPSSSVDWNRPEDVDPQGIYVISAPSIYAREVATPLFPPLHTGRAGQRQHLLFPYPSSILSVK

SEQ ID NO: 2 - protein, 587 aa, Homo sapiens
MVSPRMSGLLSQTVILALIFLPQTRPAGVFELQIHSFGPGPGPGAPRSPCSARLPCRLFFRVCLKPGLSEEAAESPCALGAALSARGPVYTEQPGAPAPDLPLPDGLLQVPFRDAWPGTFSFIIETWREELGDQIGGPAWSLLARVAGRRRLAAGGPWARDIQRAGAWELRFSYRARCEPPAVGTACTRLCRPRSAPSRCGPGLRPCAPLEDECEAPLVCRAGCSPEHGFCEQPGECRCLEGWTGPLCTVPVSTSSCLSPRGPSSATTGCLVPGPGPCDGNPCANGGSCSETPRSFECTCPRGFYGLRCEVSGVTCADGPCFNGGLCVGGADPDSAYICHCPPGFQGSNCEKRVDRCSLQPCRNGGLCLDLGHALRCRCRAGFAGPRCEHDLDDCAGRACANGGTCVEGGGAHRCSCALGFGGRDCRERADPCAARPCAHGGRCYAHFSGLVCACAPGYMGARCEFPVHPDGASALPAAPPGLRPGDPQRYLLPPALGLLVAAGVAGAALLLVHVRRRGHSQDAGSRLLAGTPEPSVHALPDALNNLRTQEGSGDGPSSSVDWNRPEDVDPQGIYVISAPSIYAREA

SEQ ID NO: 3 - protein, 5 aa, Homo sapiens
QPGAP

SEQ ID NO: 4 - protein, 4 aa, Homo sapiens
  misc_feature (2)..(2): Xaa can be any naturally occurring amino acid
GXRP

SEQ ID NO: 5 - protein, 107 aa, Homo sapiens [sequence omitted]

SEQ ID NO: 6 - protein, 329 aa, Homo sapiens
ASTKGPSVFPLAPSSKSTSGGTAALGCLVKDYFPEPVTVSWNSGALTSGVHTFPAVLQSSGLYSLSSVVTVPSSSLGTQTYICNVNHKPSNTKVDKKVEPKSCDKTHTCPPCPAPELLGGPSVFLFPPKPKDTLMISRTPEVTCVVVDVSHEDPEVKFNWYVDGVEVHNAKTKPREEQYNSTYRVVSVLTVLHQDWLNGKEYKCKVSNKALPAPIEKTISKAKGQPREPQVYTLPPSRDELTKNQVSLTCLVKGFYPSDIAVEWESNGQPENNYKTTPPVLDSDGSFFLYSKLTVDKSRWQQGNVFSCSVMHEALHNHYTQKSLSLSPG

SEQ ID NO: 7 - protein, 447 aa, Artificial Sequence
  hSC16.56 full length heavy chain protein
QVQLVQSGAEVKKPGASVKVSCKASGYTFTNYGMNWVRQAPGQGLEWMGWINTYTGEPTYADDFKGRVTMTTDTSTSTAYMELRSLRSDDTAVYYCARIGDSSPSDYWGQGTLVTVSSASTKGPSVFPLAPSSKSTSGGTAALGCLVKDYFPEPVTVSWNSGALTSGVHTFPAVLQSSGLYSLSSVVTVPSSSLGTQTYICNVNHKPSNTKVDKKVEPKSCDKTHTCPPCPAPELLGGPSVFLFPPKPKDTLMISRTPEVTCVVVDVSHEDPEVKFNWYVDGVEVHNAKTKPREEQYNSTYRVVSVLTVLHQDWLNGKEYKCKVSNKALPAPIEKTISKAKGQPREPQVYTLPPSRDELTKNQVSLTCLVKGFYPSDIAVEWESNGQPENNYKTTPPVLDSDGSFFLYSKLTVDKSRWQQGNVFSCSVMHEALHNHYTQKSLSLSPG

SEQ ID NO: 8 - protein, 214 aa, Artificial Sequence
  hSC16.56 and hSC16.56ss1 full length light chain protein
EIVMTQSPATLSVSPGERATLSCKASQSVSNDVVWYQQKPGQAPRLLIYYASNRYTGIPARFSGSGSGTEFTLTISSLQSEDFAVYYCQQDYTSPWTFGQGTKLEIKRTVAAPSVFIFPPSDEQLKSGTASVVCLLNNFYPREAKVQWKVDNALQSGNSQESVTEQDSKDSTYSLSSTLTLSKADYEKHKVYACEVTHQGLSSPVTKSFNRGEC

SEQ ID NO: 9 - protein, 447 aa, Artificial Sequence
  hSC16.56ss1 full length heavy chain protein
QVQLVQSGAEVKKPGASVKVSCKASGYTFTNYGMNWVRQAPGQGLEWMGWINTYTGEPTYADDFKGRVTMTTDTSTSTAYMELRSLRSDDTAVYYCARIGDSSPSDYWGQGTLVTVSSASTKGPSVFPLAPSSKSTSGGTAALGCLVKDYFPEPVTVSWNSGALTSGVHTFPAVLQSSGLYSLSSVVTVPSSSLGTQTYICNVNHKPSNTKVDKKVEPKSSDKTHTCPPCPAPELLGGPSVFLFPPKPKDTLMISRTPEVTCVVVDVSHEDPEVKFNWYVDGVEVHNAKTKPREEQYNSTYRVVSVLTVLHQDWLNGKEYKCKVSNKALPAPIEKTISKAKGQPREPQVYTLPPSRDELTKNQVSLTCLVKGFYPSDIAVEWESNGQPENNYKTTPPVLDSDGSFFLYSKLTVDKSRWQQGNVFSCSVMHEALHNHYTQKSLSLSPG

SEQ ID NO: 10-19 - skipped (10 entries)

SEQ ID NO: 20 - DNA, 324 bp, Mus musculus
  misc_feature (1)..(324): SC16.3 VL
  CDS (1)..(324)
caaattgttctcacccagtctccagcaatcatgtctgtatctctaggggaacgggtcaccatgacctgcactgccagctcaagtgtaagttccagttacttgcactggtaccaacaaaagccaggatcctcccccaaactctggatttatagcacatccaacctggcttctggagtcccagctcgcttcagtggcagtgggtctgggacctcttattttttcacaatcagcagcatggaggctgaagatgctgccacttattactgccaccagtatcatcgttccccattcacgttcggcgcggggacaaagttgaaaataaga

SEQ ID NO: 21 - protein, 108 aa, Mus musculus
QIVLTQSPAIMSVSLGERVTMTCTASSSVSSSYLHWYQQKPGSSPKLWIYSTSNLASGVPARFSGSGSGTSYFFTISSMEAEDAATYYCHQYHRSPFTFGAGTKLKIR

SEQ ID NO: 22 - DNA, 369 bp, Mus musculus
  misc_feature (1)..(369): SC16.3 VH
  CDS (1)..(369)
caggttactctgaaagagtctggccctgggatattgcagccctcccagaccctcagtctgacttgttctttctctgggttttcactgagcacttctggtatgggtgtaggctggattcgtcagccatcagggaagggtctggagtggctggcacacatttggtgggatgatgtcaagcgctataacccagccctgaagagccgactaactatctccaaggatacctccagcagccaggtattcctcaagatcgccagtgtggacactgcagatactgccacatactactgtgctcgaatagctgactatggcggagattactatgctatggactactggggtcaaggaacctcagtcaccgtctcctca

SEQ ID NO: 23 - protein, 123 aa, Mus musculus
QVTLKESGPGILQPSQTLSLTCSFSGFSLSTSGMGVGWIRQPSGKGLEWLAHIWWDDVKRYNPALKSRLTISKDTSSSQVFLKIASVDTADTATYYCARIADYGGDYYAMDYWGQGTSVTVSS

SEQ ID NO: 24 - DNA, 321 bp, Mus musculus
  misc_feature (1)..(321): SC16.4 VL
  CDS (1)..(321)
gatatccagatgacacagactacatcttccctgtctgcctctctgggagacagagtcaccatcagttgcagggcaagtcaggacattagcaattatttaaactggtatcagcagaaaccagatggaactgttaaactcctgatctactacacatcaagattacactcaggcgtcccatcaaggttcagtggcagtgggtctggaacagattattctctcaccattagcaacctggagctagaagatattgccacttacttttgccaacagggtgatatgcttccgtggacgttcggtggaggcaccaagctggaaatcaaa

SEQ ID NO: 25 - protein, 107 aa, Mus musculus
DIQMTQTTSSLSASLGDRVTISCRASQDISNYLNWYQQKPDGTVKLLIYYTSRLHSGVPSRFSGSGSGTDYSLTISNLELEDIATYFCQQGDMLPWTFGGGTKLEIK

SEQ ID NO: 26 - DNA, 351 bp, Mus musculus
  misc_feature (1)..(351): SC16.4 VH
  CDS (1)..(351)
cagatccagttggtgcagtctggacctgagctgaagaagcctggagagacagtcaagatctcctgcaaggcttctggttataccttcacagactattcaatgcactgggtgaagcaggctccaggaaagggtttaaagtggatgggctggataaacactgagactggtgagccaggatatgcagatgacttcaagggacggtttgccttctctttggaaacctctgccagcactgcctatttgcagatcaacaacctcaaaaatgaggacacggctacatatttctgtgctcggtacgacgggtatgctatggactattggggtcaaggaacctcagtcaccgtctcctca

SEQ ID NO: 27 - protein, 117 aa, Mus musculus
QIQLVQSGPELKKPGETVKISCKASGYTFTDYSMHWVKQAPGKGLKWMGWINTETGEPGYADDFKGRFAFSLETSASTAYLQINNLKNEDTATYFCARYDGYAMDYWGQGTSVTVSS

SEQ ID NO: 28 - DNA, 318 bp, Mus musculus
  misc_feature (1)..(318): SC16.5 VL
  CDS (1)..(318)
caaattgttctcacccagtctccagcaatcatgtctgcatctccaggggagaaggtcaccatgacctgcagtgccagctcaagtgtaagttacatgcactggtaccagcagaagtcaggcacctcccccaaaagatggatttatgacacatccaaactggcttctggagtccctgctcgcttcagtggcagtgggtctgggacctcttactctctcacaatcagcagcatggaggctgaagatgctgccacttattactgccagcagtggactagaaacccgctcacgttcggggctggaaccaagctggagctgaaa

SEQ ID NO: 29 - protein, 106 aa, Mus musculus
QIVLTQSPAIMSASPGEKVTMTCSASSSVSYMHWYQQKSGTSPKRWIYDTSKLASGVPARFSGSGSGTSYSLTISSMEAEDAATYYCQQWTRNPLTFGAGTKLELK

SEQ ID NO: 30 - DNA, 372 bp, Mus musculus
  misc_feature (1)..(372): SC16.5 VH
  CDS (1)..(372)
caggttactctgaaagagtctggccctgggatattgcagccctcccagaccctcagtctgacttgttctttctctgggttttcactgagcacttctggtatgggtgtaggctggattcgtcagccttcaggagagggtctagagtggctggcagacatttggtgggatgacaataagtactataacccatccctgaagagccggctcacaatctccaaggatacctccagcaaccaggtattcctcaagatcaccagtgtggacactgcagatactgccacttactactgtgctcgaagagttaactatgtttacgacccgtactatgctatggactactggggtcaaggaacctcagtcaccgtctcctca

SEQ ID NO: 31 - protein, 124 aa, Mus musculus
QVTLKESGPGILQPSQTLSLTCSFSGFSLSTSGMGVGWIRQPSGEGLEWLADIWWDDNKYYNPSLKSRLTISKDTSSNQVFLKITSVDTADTATYYCARRVNYVYDPYYAMDYWGQGTSVTVSS

SEQ ID NO: 32 - DNA, 336 bp, Mus musculus
  misc_feature (1)..(336): SC16.7 VL
  CDS (1)..(336)
aacattatgatgacacagtcgccatcatctctggctgtgtctgcaggagaaaaggtcactatgagctgtaagtccagtcaaagtgttttatacagttcaaatcagaagaactacttggcctggtaccaacagaaaccagggcagtctcctaaactgctgatctactgggcatccactagggaatctggtgtccctgatcgcttcacaggcagtggatctgggacagattttactcttaccatcagcactgtacaagttgaagacctggcagtttattactgtcatcaatacctctcctcgtggacgttcggtggaggcaccaagctggaaatcaaa

SEQ ID NO: 33 - protein, 112 aa, Mus musculus
NIMMTQSPSSLAVSAGEKVTMSCKSSQSVLYSSNQKNYLAWYQQKPGQSPKLLIYWASTRESGVPDRFTGSGSGTDFTLTISTVQVEDLAVYYCHQYLSSWTFGGGTKLEIK

SEQ ID NO: 34 - DNA, 357 bp, Mus musculus
  misc_feature (1)..(357): SC16.7 VH
  CDS (1)..(357)
gaggtccagctgcaacagtctggacctgagctggtgaagcctggggcttcagtgaagatttcctgcaaggcttctggttactcattcactggctataaaatgcactgggtgaagcaaagccatgtaaagagccttgagtggattggacgtattaatccttacaatggtgctactagctacaaccagaatttcaaggacaaggccaccttgactgtagataagtcctccagcacagcctacatggacctccacagcctgacatctgaggactctgcagtctatttctgtgcaagaggggactataggtacgactggtttgcttactggggccaagggactctggtcactgtctctgca

SEQ ID NO: 35 - protein, 119 aa, Mus musculus
EVQLQQSGPELVKPGASVKISCKASGYSFTGYKMHWVKQSHVKSLEWIGRINPYNGATSYNQNFKDKATLTVDKSSSTAYMDLHSLTSEDSAVYFCARGDYRYDWFAYWGQGTLVTVSA

SEQ ID NO: 36 - DNA, 321 bp, Mus musculus
  misc_feature (1)..(321): SC16.8 VL
  CDS (1)..(321)
gaaatccagatgacccagtctccatcctctatgtctgcatctctgggagacagaataaccatcacttgccaggcaactcaagacattgttaagaatttaaactggtatcagcagaaaccagggaaacccccttcattcctgatctattatgcaattgaactggcagaaggggtcccatcaaggttcagtggcagtgggtctgggtcagactattctctgacaatcagcaacctggagtctgaagattttgcagactattactgtctacagttttatgagtttccgttcacgttcggtgctgggaccaagctggagctgaaa

SEQ ID NO: 37 - protein, 107 aa, Mus musculus
EIQMTQSPSSMSASLGDRITITCQATQDIVKNLNWYQQKPGKPPSFLIYYAIELAEGVPSRFSGSGSGSDYSLTISNLESEDFADYYCLQFYEFPFTFGAGTKLELK

SEQ ID NO: 38 - DNA, 363 bp, Mus musculus
  misc_feature (1)..(363): SC16.8 VH
  CDS (1)..(363)
caggcccagctgcagcagtctggagctgagctggtaaggcctgggacttcagtgaaggtgtcctgcaaggcttctggatacgccttcactaattacttgatagagtgggtaaagcagaggcctggacagggccttgagtggattggagtgattaatcctggaactggtggtactaactacaatgagaacttcaagggcaaggcaactctgactgcagacaaatcctccagtactgcctacatgcagctcagcagcctgacatctgatgactctgcggtctatttctgtgcaagatccccctatgattaccacgagggtgctatggactactggggtcaaggaacctcagtcaccgtctcctca

SEQ ID NO: 39 - protein, 121 aa, Mus musculus
QAQLQQSGAELVRPGTSVKVSCKASGYAFTNYLIEWVKQRPGQGLEWIGVINPGTGGTNYNENFKGKATLTADKSSSTAYMQLSSLTSDDSAVYFCARSPYDYHEGAMDYWGQGTSVTVSS

SEQ ID NO: 40 - DNA, 324 bp, Mus musculus
  misc_feature (1)..(324): SC16.10 VL
  CDS (1)..(324)
caaattgttctcacccagtctccagcaatcatgtctgcatctctaggggaacgggtcaccatgacctgcactgccagctcaagtgtaagttccagttacttgcactggtaccagcagaagccaggatcatcccccaaactctggatttatagcacttccaacctggcttctggagtcccaactcgcttcagtggcagtgggtctgggacctcttactctctcacaatcagcagcatggaggctgaagatgctgccacttattactgccaccagtatcatcgttccccattcacgttcggctcggggacaaagttggaaataaaa

SEQ ID NO: 41 - protein, 108 aa, Mus musculus
QIVLTQSPAIMSASLGERVTMTCTASSSVSSSYLHWYQQKPGSSPKLWIYSTSNLASGVPTRFSGSGSGTSYSLTISSMEAEDAATYYCHQYHRSPFTFGSGTKLEIK

SEQ ID NO: 42 - DNA, 360 bp, Mus musculus
  misc_feature (1)..(360): SC16.10 VH
  CDS (1)..(360)
caggttactctgaaagagtctggccctgggatattgcagtcctcccagaccctcagtctgacttgttctttctctgggttttcactgagcacttctggtatgggtgtaggctggattcgtcagccatcagggaagggtctggagtggctggcacacatttggtgggatgatgtcaagcgctataacccagtcctgaagagccgactgactatctccaaggatacctccagcagccaggtattcctcaagatcgccagtgtggacactgcagatactgccacatactattgtgctcgattagttgatgatctgtactactttgactactggggccaaggcaccactctcacagtctcctca

SEQ ID NO: 43 - protein, 120 aa, Mus musculus
QVTLKESGPGILQSSQTLSLTCSFSGFSLSTSGMGVGWIRQPSGKGLEWLAHIWWDDVKRYNPVLKSRLTISKDTSSSQVFLKIASVDTADTATYYCARLVDDLYYFDYWGQGTTLTVSS

SEQ ID NO: 44 - DNA, 336 bp, Mus musculus
  misc_feature (1)..(336): SC16.11 VL
  CDS (1)..(336)
gatgttgagatgacccagactccactcactttgtcggttaccattggacaaccagcctccatctcttgcaagtcaagtcagagcctctcagacagtgatggaaagacatatttgaattggatgtttcagaggccaggccggtctccaaagcgcctaatctatctggtgtctaaactggactctggagtccctgacaggttcactggcagtggatcagggacagatttcacactgaaaatcagcagagtggaggctgaggatttgggagtttactattgctggcaaggtaaacattttccgtggacgttcggtggaggcaccaagctggaaatcaaa

SEQ ID NO: 45 - protein, 112 aa, Mus musculus
DVEMTQTPLTLSVTIGQPASISCKSSQSLSDSDGKTYLNWMFQRPGRSPKRLIYLVSKLDSGVPDRFTGSGSGTDFTLKISRVEAEDLGVYYCWQGKHFPWTFGGGTKLEIK

SEQ ID NO: 46 - DNA, 351 bp, Mus musculus
  misc_feature (1)..(351): SC16.11 VH
  CDS (1)..(351)
cagatccagttggtgcagtctggacctgagctgaagaagcctggagagacagtcaagatctcctgcaaggcttctggttataccttcacagactattcaatgcactgggtgaagcaggctccaggaaagggtttaaagtggatgggctggataaacactgagactgttgagccaacatatgcagatgacttcatgggacggtttgccttctctttggaaacctctgccagcactgcctttttgcagatcaacaacctcgaaaatgaggacacggctacatatttctgtgctagatttggttcctatgctatggactactggggtcaaggaacctcagtcaccgtctcctca

SEQ ID NO: 47 - protein, 117 aa, Mus musculus
QIQLVQSGPELKKPGETVKISCKASGYTFTDYSMHWVKQAPGKGLKWMGWINTETVEPTYADDFMGRFAFSLETSASTAFLQINNLENEDTATYFCARFGSYAMDYWGQGTSVTVSS

SEQ ID NO: 48 - DNA, 318 bp, Mus musculus
  misc_feature (1)..(318): SC16.13 VL
  CDS (1)..(318)
caaattgttctcacccagtctccagcactcgtgtctgcatctccaggggagaaggtcaccatgacctgcagtgccagctcaagtgtaagttacatgtactggtaccagcagaaaccaagatcctcccccaaaccctggatttatctcacatccaacctggcttctggagtccctgctcgcttcagtggcagtgggtctgggacctcttactctctcacaatcagcagcatggaggctgaagatgctgccacttattactgccagcagtggcgtagtaacccattcacgttcggctcggggacaaagttggaaataaaa

SEQ ID NO: 49 - protein, 106 aa, Mus musculus
QIVLTQSPALVSASPGEKVTMTCSASSSVSYMYWYQQKPRSSPKPWIYLTSNLASGVPARFSGSGSGTSYSLTISSMEAEDAATYYCQQWRSNPFTFGSGTKLEIK

SEQ ID NO: 50 - DNA, 372 bp, Mus musculus
  misc_feature (1)..(372): SC16.13 VH
  CDS (1)..(372)
caggttactctgaaagagtctggccctgggatattgcagccctcccagaccctcagtctgacttgttctttctctgggttttcactgagcacttctggtatgggtgtaggctggattcggcagccatcagggaagggtctggagtggctggcacacatttggtgggatgatgtcaagcgctataacccagccctgaagagccgactgactatctccaaggatacctccagcagccaggtattcctcaagatcgccagtgtggacactgcagatactgccacatactactgtgctcgcatagtttcctttgataacgacgttgtctctgctatggactactggggtcaaggaacctcagtcaccgtctcctcn

SEQ ID NO: 51 - protein, 124 aa, Mus musculus
  misc_feature (124)..(124): The 'Xaa' at location 124 stands for Ser.
QVTLKESGPGILQPSQTLSLTCSFSGFSLSTSGMGVGWIRQPSGKGLEWLAHIWWDDVKRYNPALKSRLTISKDTSSSQVFLKIASVDTADTATYYCARIVSFDNDVVSAMDYWGQGTSVTVSX

SEQ ID NO: 52 - DNA, 321 bp, Mus musculus
  misc_feature (1)..(321): SC16.15 VL
  CDS (1)..(321)
gacatccagatgactcagtctccagcctccctggctgcatctgtgggagaaactgtcgccatcacatgtcgagcaagtgagaacatttactacaatttagcatggtatcagcagaaacaagggaaatctcctcagctcctgatctatactgcaaacagtttggaagatggtgtcccatcgaggttcagtggcagtggatctgggacacagtattctttgaagatcaacagcatgcagcctgaagattccgcaacttatttctgtaaacaggcttatgacgttcctccgacgttcggtggaggcaccaagctggaaatcaaa

SEQ ID NO: 53 - protein, 107 aa, Mus musculus
DIQMTQSPASLAASVGETVAITCRASENIYYNLAWYQQKQGKSPQLLIYTANSLEDGVPSRFSGSGSGTQYSLKINSMQPEDSATYFCKQAYDVPPTFGGGTKLEIK

SEQ ID NO: 54 - DNA, 351 bp, Mus musculus
  misc_feature (1)..(351): SC16.15 VH
  CDS (1)..(351)
caggtccagcttcagcagtctggggctgaactggcaaaacctggggcctcagtgaagatgtcctgtaaggcttctggctacacctttactcgctactggatacactggataaaacagaggcctggacagggtctggaatggattggatacattaatcctacaactgtttatactgagttcaatcagaacttcaaggacaaggccactttgactgcagacaaatcctccaccacagcctccatgcaactgagcagcctgacatctgaggactctgcagtctattactgtgcaagaggcggtagtaacttctttgactactggggccaaggcaccactctcacagtctcctca

SEQ ID NO: 55 - protein, 117 aa, Mus musculus
QVQLQQSGAELAKPGASVKMSCKASGYTFTRYWIHWIKQRPGQGLEWIGYINPTTVYTEFNQNFKDKATLTADKSSTTASMQLSSLTSEDSAVYYCARGGSNFFDYWGQGTTLTVSS

SEQ ID NO: 56 - DNA, 321 bp, Mus musculus
  misc_feature (1)..(321): SC16.18 VL
  CDS (1)..(321)
gatatccagatgacacagactacatcctccctgtctgcctctttgggagacagagtcaccatcagttgcagggcaagtcagaatattatcaattatttaaactggtatcagcagaagccagatggaactgttaaactcctgatctactacacatcaagattacactcaggagtcccatcaaggttcagtggcagtgggtctgggacagattattctctcaccatcagcaacctggaacctgaagatattgccacttactattgtcaacagtatagtgagcgtccgtacacgttcgggggggggaccaagctggaaataaaa

SEQ ID NO: 57 - protein, 107 aa, Mus musculus
DIQMTQTTSSLSASLGDRVTISCRASQNIINYLNWYQQKPDGTVKLLIYYTSRLHSGVPSRFSGSGSGTDYSLTISNLEPEDIATYYCQQYSERPYTFGGGTKLEIK

SEQ ID NO: 58 - DNA, 351 bp, Mus musculus
  misc_feature (1)..(351): SC16.18 VH
  CDS (1)..(351)
gaagtgaagctggaggagtcaggaggaggcttggtacaacctggagaatccatgaaactctcttgtgctgcttctggattcacttttagtgatgcctggatggactgggtccgccagtctccagagaagggacttgagtgggttgctgaaattagaaacaaagctaataatcatgcaacatattatgctgagtctgtgaaagggaaattcaccatctcaagagatgattccaaaagtagagtgtacctgcaaatgaacaacttaagagctgcagacactggcatttattactgtacggcctatagtaactttgcttactggggccaagggactctggtcactgtctctaca

SEQ ID NO: 59 - protein, 117 aa, Mus musculus
EVKLEESGGGLVQPGESMKLSCAASGFTFSDAWMDWVRQSPEKGLEWVAEIRNKANNHATYYAESVKGKFTISRDDSKSRVYLQMNNLRAADTGIYYCTAYSNFAYWGQGTLVTVST

SEQ ID NO: 60 - DNA, 318 bp, Mus musculus
  misc_feature (1)..(318): SC16.19 VL
  CDS (1)..(318)
gacatccagatgacacagtctccatcctcactgtctgcatctctgggaggcaaagtcaccttcacttgcaaggcaagccaagacattcacaagtatgtagcttggtaccaacacaagcctggaaaaggtcctaggctgctcatacattacacatctacattacagccaggcatctcatcaaggttcagtggaagtgggtctgggagagattattccttcagcatcagcaacctggagcctgaagatattgcaacttattattgtctacagtataataatctgtacacgttcggaggggggaccaagctggaaataaaa

SEQ ID NO: 61 - protein, 106 aa, Mus musculus
DIQMTQSPSSLSASLGGKVTFTCKASQDIHKYVAWYQHKPGKGPRLLIHYTSTLQPGISSRFSGSGSGRDYSFSISNLEPEDIATYYCLQYNNLYTFGGGTKLEIK

SEQ ID NO: 62 - DNA, 354 bp, Mus musculus
  misc_feature (1)..(354): SC16.19 VH
  CDS (1)..(354)
gaggttcagctgcagcagtctggggctgagcttgtgaggccaggggcctcagtcaagttgtcctgcacagcttctggcttcaacattaaagacagccttttgcactgggtgaagcagaggcctgaaaagggcctggagtggattgggtggattgatcctgaggatggtgaaactaaatatgccccgaacttccaggacaaggccactataactacagactcatcctccaacacagcctacctgcaactcatcagcctgacatctgttgacactgccatctattactgtgcctatggtaactacgtgcggcactttgactactggggccaaggcaccactctcacagtctcctca

SEQ ID NO: 63 - protein, 118 aa, Mus musculus
EVQLQQSGAELVRPGASVKLSCTASGFNIKDSLLHWVKQRPEKGLEWIGWIDPEDGETKYAPNFQDKATITTDSSSNTAYLQLISLTSVDTAIYYCAYGNYVRHFDYWGQGTTLTVSS

SEQ ID NO: 64 - DNA, 321 bp, Mus musculus
  misc_feature (1)..(321): SC16.20 VL
  CDS (1)..(321)
gaaatccagatgacccagtctccatcctctatgtctgcatctctgggagacagaataaccatcacttgccaggcaactcaagacattgttaagaatttaaactggtatcagcagaaaccagggaaacccccttcattcctgatctattatgcaactgaactggcagaaggggtcccatcaaggttcagtggcagtgggtctgggtcagactattctctgacaatcaggaacctggagtctgaagactttgcagaccattactgtctacagttttatgagtttccgttcacgttcggtgctgggaccaagctggagctgaaa

SEQ ID NO: 65 - protein, 107 aa, Mus musculus
EIQMTQSPSSMSASLGDRITITCQATQDIVKNLNWYQQKPGKPPSFLIYYATELAEGVPSRFSGSGSGSDYSLTIRNLESEDFADHYCLQFYEFPFTFGAGTKLELK

SEQ ID NO: 66 - DNA, 363 bp, Mus musculus
  misc_feature (1)..(363): SC16.20 VH
  CDS (1)..(363)
caggtccagttgcagcagtctggaactgagctggtaaggcctgggacttcagtgagggtgtcctgcaaggcttctggatacgccttcggtaatcacttgattgagtgggtgaagcagaggcctggacagggccttgagtggattggagtgattaatcctggaactggtggtactcactacaatgagaagttcaaggacaaggcaagactgaccgcagacaaatcctccaacactgcctacatgcacctcaacagcctgacatctgatgactctgcggtctatttctgtgcaagatccccctatgattaccacgagggtgctatggactactggggtcaaggaacctcagtcaccgtctcctca

SEQ ID NO: 67 - protein, 121 aa, Mus musculus
QVQLQQSGTELVRPGTSVRVSCKASGYAFGNHLIEWVKQRPGQGLEWIGVINPGTGGTHYNEKFKDKARLTADKSSNTAYMHLNSLTSDDSAVYFCARSPYDYHEGAMDYWGQGTSVTVSS

SEQ ID NO: 68 - DNA, 339 bp, Mus musculus
  misc_feature (1)..(339): SC16.21 VL
  CDS (1)..(339)
gacattgtgatgacacagtctccatcctccctggctatgtcagtaggacagaaggtcactatgagctgcaagtccagtcagagccttttaaatagtagcaatcaaaagaattatttggcctggtatcagcaggaaccaggacagtctcctaaacttctggtatcctttgcatccactagggaatctggggtccctgatcgcttcacaggcagtggatctgggacagatttcactcttaccatcagcggtgtgcaggctgaagacctggcagtttattactgtcagcaacattatagcattccgctcacgttcggtgctgggaccaagctggagctgaaa

SEQ ID NO: 69 - protein, 113 aa, Mus musculus
DIVMTQSPSSLAMSVGQKVTMSCKSSQSLLNSSNQKNYLAWYQQEPGQSPKLLVSFASTRESGVPDRFTGSGSGTDFTLTISGVQAEDLAVYYCQQHYSIPLTFGAGTKLELK

SEQ ID NO: 70 - DNA, 372 bp, Mus musculus
  misc_feature (1)..(372): SC16.21 VH
  CDS (1)..(372)
caggttcagctacaacagtctggacctgagctggtgaagcctggggcctcagtgaagatttcctgcaaggcttctggctatgcattcagtagctcctggatgaactgggtgaagcagaggcctggaaagggtcttgagtggattggacggatttatcctggagatggagatactaactacaatgggaagttcaagggcaaggccacactgactgcagacaaatcctccagcacagcctacatgcaactcagcagcctgacatctgaggactctgcggtctacttctgtgcaatgggtatttataactacgatggtagccgttactattctatggactactggggtcaaggaacctcagtcaccgtctcctca

SEQ ID NO: 71 - protein, 124 aa, Mus musculus
QVQLQQSGPELVKPGASVKISCKASGYAFSSSWMNWVKQRPGKGLEWIGRIYPGDGDTNYNGKFKGKATLTADKSSSTAYMQLSSLTSEDSAVYFCAMGIYNYDGSRYYSMDYWGQGTSVTVSS

SEQ ID NO: 72 - DNA, 321 bp, Mus musculus
  misc_feature (1)..(321): SC16.22 VL
  CDS (1)..(321)
gatatccagatgacacagactacatcctccctgtctgcctctctgggagacagagtcaccatcagttgcagggcaagtcaggacattaagaattatttaaactggtatcagcagaaaccagatggaactgttaaacccctgatctactacacatcaagagtacactcaggagtcccatcaaggttcagtggcagtgggtctggaacagattattctctcaccattagcaacctggagcaagaagatattgccacttacttttgccagcagggttatacgcttccattcacgttcggctcggggacaaagttggaaathaar

SEQ ID NO: 73 - protein, 107 aa, Mus musculus
DIQMTQTTSSLSASLGDRVTISCRASQDIKNYLNWYQQKPDGTVKPLIYYTSRVHSGVPSRFSGSGSGTDYSLTISNLEQEDIATYFCQQGYTLPFTFGSGTKLEIK

SEQ ID NO: 74 - DNA, 360 bp, Mus musculus
  misc_feature (1)..(360): SC16.22 VH
  CDS (1)..(360)
caggtccagctgcagcagcctggggctgaactggtgaagcctggggcttcagtgaagctgtcctgtaaggcttctggatacaccttcactacctactggatgcactgggtgaagcagaggcctggacaaggccttgagtggatcggagagattgatccttctgatagttatacttactacaatcaaaagttcaagggcaaggccacattgactgtagacaaatcctccagcacagcctacatgcaactcagcagcctgacatctgaggactctgcggtctattattgtgcaagaggggactatggtaacccctatgctatggactactggggtcaaggatcctcagtcaccgtctcctca

SEQ ID NO: 75 - protein, 120 aa, Mus musculus
QVQLQQPGAELVKPGASVKLSCKASGYTFTTYWMHWVKQRPGQGLEWIGEIDPSDSYTYYNQKFKGKATLTVDKSSSTAYMQLSSLTSEDSAVYYCARGDYGNPYAMDYWGQGSSVTVSS

SEQ ID NO: 76 - DNA, 324 bp, Mus musculus
  misc_feature (1)..(324): SC16.23 VL
  CDS (1)..(324)
caaattgttctcacccagtctccagcaatcatgtctgcatctcctggggagaaggtcaccttgacctgcagtgccagctcaagtgtaagttccaggtacttgtactggtaccagcagaagccaggatcctcccccaaactctggatttatagcacatccaacctggcttctggagtccctgctcgcttcagtggcagtgggtctgggacctcttactctctcataatcagcagcatggaggctgaagatgctgcctcttatttctgccatcagtggagtaattacccactcacgttcggtgctgggaccaagctggagctgaaa

SEQ ID NO: 77 - protein, 108 aa, Mus musculus
QIVLTQSPAIMSASPGEKVTLTCSASSSVSSRYLYWYQQKPGSSPKLWIYSTSNLASGVPARFSGSGSGTSYSLIISSMEAEDAASYFCHQWSNYPLTFGAGTKLELK

SEQ ID NO: 78 - DNA, 372 bp, Mus musculus
  misc_feature (1)..(372): SC16.23 VH
  CDS (1)..(372)
caggttactctgaaagagtctggccctgggatattgcagccctcccagaccctcagtctgacttgttctttctctgggttttcactgagcacttctaatacgggcataggctggattcgtcagccttcagggacgggtctggagtggctggcacacatttggtggaatgatgataagtactataatccatccctgaagagccggctcacaatctccaaggaaacctccaacaaccaggtattcctcaagatcaccaatgtggacactgcagatactgcctcatacttctgtgttcaaatcgggcgcgactacagtaactacgcctggtatttcgatgtctggggcgcagggaccacggtcaccgtctcctca

SEQ ID NO: 79 - protein, 124 aa, Mus musculus
QVTLKESGPGILQPSQTLSLTCSFSGFSLSTSNTGIGWIRQPSGTGLEWLAHIWWNDDKYYNPSLKSRLTISKETSNNQVFLKITNVDTADTASYFCVQIGRDYSNYAWYFDVWGAGTTVTVSS

SEQ ID NO: 80 - DNA, 318 bp, Mus musculus
  misc_feature (1)..(318): SC16.25 VL
  CDS (1)..(318)
caaattgttctcacccagtctccagcaatcatgtctgcatctccaggggagaaggtcaccatgacctgcagtgccagctcaagtgtaagttacatgcactggtaccagcagaagtcaggcacctcccccaaaagatggatttatgactcatccaaactggcttctggagtccctgctcgcttcagtggcagtgggtctgggacctcttactctctcacaatcagcagcatggaggctgaagatgctgccacttattactgccagcagtggagtagtaacccgctcacgttcggtgctgggaccaagctggagctgaaa

SEQ ID NO: 81 - protein, 106 aa, Mus musculus
QIVLTQSPAIMSASPGEKVTMTCSASSSVSYMHWYQQKSGTSPKRWIYDSSKLASGVPARFSGSGSGTSYSLTISSMEAEDAATYYCQQWSSNPLTFGAGTKLELK

SEQ ID NO: 82 - DNA, 372 bp, Mus musculus
  misc_feature (1)..(372): SC16.25 VH
  CDS (1)..(372)
caggttactctgaaagagtctggccctgggatattgcagccctcccagaccctcagtctgacttgttctttctctgggttttcactgagcacttctggtatgggtgtaggctggattcgtcagccttcaggagagggtctagagtggctgacagacatttggtgggatgacaataagtactataacccatccctgaagagccggctcacaatctccaaggatacctccagcaaccaggtattcctcaatatcaccagtgtggacactgcagatactgccacttactactgtgctcgaagagttaactattattacgacccgtactatgctatggactactggggtcaaggaacctcagtcaccgtctcctca

SEQ ID NO: 83 - protein, 124 aa, Mus musculus
QVTLKESGPGILQPSQTLSLTCSFSGFSLSTSGMGVGWIRQPSGEGLEWLTDIWWDDNKYYNPSLKSRLTISKDTSSNQVFLNITSVDTADTATYYCARRVNYYYDPYYAMDYWGQGTSVTVSS

SEQ ID NO: 84 - DNA, 336 bp, Mus musculus; identical to SEQ ID NO: 44
  misc_feature (1)..(336): SC16.26 VL
  CDS (1)..(336)

SEQ ID NO: 85 - protein, 112 aa, Mus musculus; identical to SEQ ID NO: 45

SEQ ID NO: 86 - DNA, 351 bp, Mus musculus
  misc_feature (1)..(351): SC16.26 VH
  CDS (1)..(351)
cagatccagttggtgcagtctggacctgagctgaagaagcctggagagacagtcaagatctcctgcaaggcttctggttattccttcacagactattcaatgcactgggtgaagcaggctccaggaaagggtttaaagtggatgggctggataaacactgagactgttgagccaacatatgcagatgacttcatgggacggtttgccttctctttggaaacctctgccagcactgcctttttgcagatcaacaacctcgaaaatgaggacacggctacatatttctgtgctagatttggttcctatgctatggactactggggtcaaggaacctcagtnacvgtntcntcn

SEQ ID NO: 87 - protein, 117 aa, Mus musculus
  misc_feature (114)..(114): The 'Xaa' at location 114 stands for Thr.
  misc_feature (116)..(116): The 'Xaa' at location 116 stands for Ser.
  misc_feature (117)..(117): The 'Xaa' at location 117 stands for Ser.
QIQLVQSGPELKKPGETVKISCKASGYSFTDYSMHWVKQAPGKGLKWMGWINTETVEPTYADDFMGRFAFSLETSASTAFLQINNLENEDTATYFCARFGSYAMDYWGQGTSVXVXX

SEQ ID NO: 88 - DNA, 318 bp, Mus musculus
  misc_feature (1)..(318): SC16.29 VL
  CDS (1)..(318)
caaattgttctcacccagtctccagcaatcatgtctgcatctccaggggagaaggtcaccataacctgcagtgccagctcaagtgtaagttacatgcactggttccagcagaagccaggcacttctcccaaactctggatttataccacatccaacctggcttctggagtccctgctcgcttcagtggcagtggatctgggacctcttactctctcacagtcagccgaatggaggctgaagatgctgccacttattactgccagcaaaggagtctttatccgtacacgttcggaggggggaccaaggtggaaataaaa

SEQ ID NO: 89 - protein, 106 aa, Mus musculus
QIVLTQSPAIMSASPGEKVTITCSASSSVSYMHWFQQKPGTSPKLWIYTTSNLASGVPARFSGSGSGTSYSLTVSRMEAEDAATYYCQQRSLYPYTFGGGTKVEIK

SEQ ID NO: 90 - DNA, 363 bp, Mus musculus
  misc_feature (1)..(363): SC16.29 VH
  CDS (1)..(363)
caggttcagctacagcagtctggagctgagctggcgaggcccggggcttcagtgaagctgtcctgcaaggcttcaggctacaccttcactgaccagtatataaactgggtgaagcagaggactggacagggccttgagtggattggagagatttatcccggaaggggtaatacttactacaatgagaagttcaagggcaaggccacactgactgcagacaaatcctccagcacagcctacatgcaactcagcagcctgacatctgaggactctgcagtctatttctgtgcaagagaggatggtggttacgacgatgcctggtttgcttactggggccaagggactctggtcactgtctctgca

SEQ ID NO: 91 - protein, 121 aa, Mus musculus
QVQLQQSGAELARPGASVKLSCKASGYTFTDQYINWVKQRTGQGLEWIGEIYPGRGNTYYNEKFKGKATLTADKSSSTAYMQLSSLTSEDSAVYFCAREDGGYDDAWFAYWGQGTLVTVSA

SEQ ID NO: 92 - DNA, 324 bp, Mus musculus
  misc_feature (1)..(324): SC16.30 VL
  CDS (1)..(324)
caaattgttctgacccagtctccaacaatcatgtctgcatctctaggggaacgggtcaccatgacctgcactgccagctcaagtgtaacttccagttacttgcactggtaccagcagaagccaggatcctcccccaaactctggatttatagcacatccaacctggcttctggagtcccagctcgcttcagtggcagtgggtctgggacctcttactctctcacaatcagcagcatggaggctgaagatgctgccacttattactgccaccagtttcatcgttccccattcacgttcggctcggggacaaagttggaaataaaa

SEQ ID NO: 93 - protein, 108 aa, Mus musculus
QIVLTQSPTIMSASLGERVTMTCTASSSVTSSYLHWYQQKPGSSPKLWIYSTSNLASGVPARFSGSGSGTSYSLTISSMEAEDAATYYCHQFHRSPFTFGSGTKLEIK

SEQ ID NO: 94 - DNA, 360 bp, Mus musculus
  misc_feature (1)..(360): SC16.30 VH
  CDS (1)..(360)
caggttactctgaaagagtctggccctgggatattgcagccctcccagaccctcagtctgacttgttctttctctgggttttcactgagcacttctggtatgggtgtaggctggattcgtcagccatcagggaagggtctggagtggctggcacacatttggtgggatgatgtcaagcgctataaaccagccctgaagagccgactgactgtctccaaggatacctccagcaaccaggttttcctcaagatcgccactgtggacgctgcagatactggcacatactactgtgctcgaatcgttgatggtcaccccccgtttgcttactggggccaagggactctggtcactgtctctgca

SEQ ID NO: 95 - protein, 120 aa, Mus musculus
QVTLKESGPGILQPSQTLSLTCSFSGFSLSTSGMGVGWIRQPSGKGLEWLAHIWWDDVKRYKPALKSRLTVSKDTSSNQVFLKIATVDAADTGTYYCARIVDGHPPFAYWGQGTLVTVSA

SEQ ID NO: 96 - DNA, 336 bp, Mus musculus
  misc_feature (1)..(336): SC16.30 VL
  CDS (1)..(336)
gacattgtgctgacccagtctccactctctctgcctgtcaatattggagatcaagcctctatctcttgcaagtctactaagagtcttctgaatagtgatggattcacttatttggactggtatttgcagaggccaggccagtctccacaattcctaatatatttggtttctaatcgattttctggagttccagacaggttcagtggcagtgggtcaggaacagatttcacactcaagatcagcagagtggaggctgaggatttgggagtatattattgcttccagagtaactatcttccgctcacgttcggtgctgggaccaagctggagctgaga

SEQ ID NO: 97 - protein, 112 aa, Mus musculus
DIVLTQSPLSLPVNIGDQASISCKSTKSLLNSDGFTYLDWYLQRPGQSPQFLIYLVSNRFSGVPDRFSGSGSGTDFTLKISRVEAEDLGVYYCFQSNYLPLTFGAGTKLELR

SEQ ID NO: 98 - DNA, 357 bp, Mus musculus
  misc_feature (1)..(357): SC16.31 VH
  CDS (1)..(357)
gaggtccaactgcagcagtctggacctgagctggtgaagcctggggcttcagtgaagatatcctgcaaggcttctggttactcattcagtcgtttctatatgcactgggtgaagcaaagtcctgaaaatagtcttgagtggattggagagattaatcctagcactgggggtacaagctacaaccagaagttcaagggcaaggccacattaactgtagataaatcctccagcacagcctacatgcagctcaagagcctgacatctgaagagtctgcagtctattactgtactaggggttacgggagcaactggtacttcgatgtctggggcgcagggaccacggtcaccgtctccaca

SEQ ID NO: 99 - protein, 119 aa, Mus musculus
EVQLQQSGPELVKPGASVKISCKASGYSFSRFYMHWVKQSPENSLEWIGEINPSTGGTSYNQKFKGKATLTVDKSSSTAYMQLKSLTSEESAVYYCTRGYGSNWYFDVWGAGTTVTVST

SEQ ID NO: 100 - DNA, 321 bp, Mus musculus
  misc_feature (1)..(321): SC16.34 VL
  CDS (1)..(321)
agtattgtgatgacccagactcccaaattcctgcttgtatcagcaggagacagggttaccataacctgcaaggccagtcagagtgtgagtaatgatgtagcttggtaccaacagaagccagggcagtctcctaaactgctgatatactatgcatccaatcgctacagtggagtccctgatcgcttcactggcagtggatatgggacggatttcactttcaccatcagcactgtgcaggctgaagacctggcagtttatttctgtcagcaggattatagctctccgtggacgttcggtggaggcaccaagctggaaatcaaa

SEQ ID NO: 101 - protein, 107 aa, Mus musculus
SIVMTQTPKFLLVSAGDRVTITCKASQSVSNDVAWYQQKPGQSPKLLIYYASNRYSGVPDRFTGSGYGTDFTFTISTVQAEDLAVYFCQQDYSSPWTFGGGTKLEIK

SEQ ID NO: 102 - DNA, 354 bp, Mus musculus
  misc_feature (1)..(354): SC16.34 VH
  CDS (1)..(354)
cagatccagttggtgcagtctggacctgagctgaagaggcctggagagacagtcaagatctcctgcaaggcttctggatataccttcacaaactatggaatgaactgggtgaagcaggctccaggaaagggtttaaagtggatgggctggataaacacgtacactggagacccaacatatgctgatgacttcaagggacggtttgccttctctttggaaacctctgccagcactgcctatttgcagatcaacaacctcaaaaatgaggacacggctacatatttctgtgcaagaattggcggtaatagtccctctgattactggggccaaggcacctctctcacagtctcctca

SEQ ID NO: 103 - protein, 118 aa, Mus musculus
QIQLVQSGPELKRPGETVKISCKASGYTFTNYGMNWVKQAPGKGLKWMGWINTYTGDPTYADDFKGRFAFSLETSASTAYLQINNLKNEDTATYFCARIGGNSPSDYWGQGTSLTVSS

SEQ ID NO: 104 - DNA, 321 bp, Mus musculus
  misc_feature (1)..(321): SC16.35 VL
  CDS (1)..(321)
gatatccagatgacacagactacatcctccctgtctgcctctctgggagacagagtcaccatcagttgcagggcaagtcaggacattagcaattatttaaactggtatcagcagaaaccagatggaactgttaaactcctgatctactacacatcaagattacactcaggagtcccatcaaggttcagtggcagtgggtctggaacagattattctctcaccattagcaacctggagcaagaagatattgccacttacttttgccaacagggtaatacgcttccgtacacgttcggaggggggaccaagctggaaataaaa

SEQ ID NO: 105 - protein, 107 aa, Mus musculus
DIQMTQTTSSLSASLGDRVTISCRASQDISNYLNWYQQKPDGTVKLLIYYTSRLHSGVPSRFSGSGSGTDYSLTISNLEQEDIATYFCQQGNTLPYTFGGGTKLEIK

SEQ ID NO: 106 - DNA, 360 bp, Mus musculus
  misc_feature (1)..(360): SC16.35 VH
  CDS (1)..(360)
gatgtgcagcttcaggagtcgggacctggcctggtgaaaccttctcagtctctgtccctcacctgcactgtcactggctactcaatcaccagtgattatgcctggaactggatccggcagtttccaggaaacaaactggagtggatgggctacataagctacagtggtagcactagctacaacccatctctcaaaagtcgaatctctatcactcgagacacatccaagaaccagttcttcctgcagttgaattctgtgactactgaggacacagccacatattactgtgcaagattttactacggtagtagctatgctatggactactggggtcaaggaacctcagtcaccgtctcctca

SEQ ID NO: 107 - protein, 120 aa, Mus musculus
DVQLQESGPGLVKPSQSLSLTCTVTGYSITSDYAWNWIRQFPGNKLEWMGYISYSGSTSYNPSLKSRISITRDTSKNQFFLQLNSVTTEDTATYYCARFYYGSSYAMDYWGQGTSVTVSS

SEQ ID NO: 108 - DNA, 321 bp, Mus musculus
  misc_feature (1)..(321): SC16.36 VL
  CDS (1)..(321)
gaaacaactgtgacccagtctccagcatccctgtccgtgactacaggagaaaaagtcactatcagatgcataaccacccctgatattgatgatgatatgaactggtaccagcagaagccaggggaacctcctaacctccttatttcagaaggcaatagtcttcgtcctggagtcccatcccgattctccagcagtggctatggcacaaattttgtttttacaattgaaaacacgctctcagaagatgttgcagattactactgtttgcaaagtgataacatgccattcacgttcggctcggggacaaagttggaaataaar

SEQ ID NO: 109 - protein, 107 aa, Mus musculus
ETTVTQSPASLSVTTGEKVTIRCITTPDIDDDMNWYQQKPGEPPNLLISEGNSLRPGVPSRFSSSGYGTNFVFTIENTLSEDVADYYCLQSDNMPFTFGSGTKLEIK

SEQ ID NO: 110 - DNA, 354 bp, Mus musculus
  misc_feature (1)..(354): SC16.35 VH
  CDS (1)..(354)
caggtccagctgcagcagtctggggctgaactggcaaaacctggggcctcagtgaagatgtcctgcaaggcttctggctacacctttactacctactggatgcactgggtaaaacagaggcctggacagggtctggaatggattggatacattaatcctagcagtggttatactgagtacaatcagaagttcaaggacaaggccacattgactgcagacaaatcctccagcacagcctacatgcaactaagcagcctgacatctgaggactcttcagtctattactgtgcaagaaagggtagtaacagggggtttgcttactggggccaagggactctggtcactgtctcttcn

SEQ ID NO: 111 - protein, 118 aa, Mus musculus
  misc_feature (118)..(118): The 'Xaa' at location 118 stands for Ser.
QVQLQQSGAELAKPGASVKMSCKASGYTFTTYWMHWVKQRPGQGLEWIGYINPSSGYTEYNQKFKDKATLTADKSSSTAYMQLSSLTSEDSSVYYCARKGSNRGFAYWGQGTLVTVSX

SEQ ID NO: 112 - DNA, 312 bp, Mus musculus
  misc_feature (1)..(312): SC16.38 VL
  CDS (1)..(312)
caaattgttctcacccagtctccagcaatcatgtctgcatctccaggggagaaggtcaccatgacctgcagtgccagctcaagtataaattacatgcactggtaccagcagaagccaggcacctcccccaaaagatggatttatgacacatccaaactggcttctggagtccctgctcgcttcagtggcagtgggtctgggacctcttattctctcacaatcagcagcatggaggctgaagatgctgccacttattactgccatcagcggagtacgtggacgttcggtggaggcaccaagctggaaatcaaa

SEQ ID NO: 113 - protein, 104 aa, Mus musculus
QIVLTQSPAIMSASPGEKVTMTCSASSSINYMHWYQQKPGTSPKRWIYDTSKLASGVPARFSGSGSGTSYSLTISSMEAEDAATYYCHQRSTWTFGGGTKLEIK

SEQ ID NO: 114 - DNA, 348 bp, Mus musculus
  misc_feature (1)..(348): SC16.38 VH
  CDS (1)..(348)
gaggttcagctgcagcagtctggggcagagcttgtgaagccaggggcctcagtcaagttgtcctgcacagtttctggcttcaacattaaagacacctatatacactgggtgaagcagaggcctgaacagggcctggagtggattggaaggattgatcctgcgaatggtaatactaaatatgacccgaagttccagggcaaggccactataacagcagacacatcctccaacacagcctacctgcagctcagcagcctgacatctgaggacactgccgtctattactgtgctagaccgacggggtactttgaatactggggccaaggcaccactctcacagtctcctca

SEQ ID NO: 115 - protein, 116 aa, Mus musculus
EVQLQQSGAELVKPGASVKLSCTVSGFNIKDTYIHWVKQRPEQGLEWIGRIDPANGNTKYDPKFQGKATITADTSSNTAYLQLSSLTSEDTAVYYCARPTGYFEYWGQGTTLTVSS

SEQ ID NO: 116 - DNA, 321 bp, Mus musculus
  misc_feature (1)..(321): SC16.41 VL
  CDS (1)..(321)
gatatccagatgacacagactacatcctccctgtctgcctctttgggagacagagtcaccatcagttgcagggcaagtcaggatgttatcaattatttaaactggtatcagcagaaaccagatggaactgttaaactcctgatctactacacatcaaggttacactcaggagtcccatcaaggttcagtggcagtgggtctaggacagattattctctcaccatcagcaacctggaacctgaagatattgccacttactattgtcagcagtatagtgagcgtccgtacacgttcggaggggggaccaagctggaaataaaa

SEQ ID NO: 117 - protein, 107 aa, Mus musculus
DIQMTQTTSSLSASLGDRVTISCRASQDVINYLNWYQQKPDGTVKLLIYYTSRLHSGVPSRFSGSGSRTDYSLTISNLEPEDIATYYCQQYSERPYTFGGGTKLEIK

SEQ ID NO: 118 - DNA, 351 bp, Mus musculus
  misc_feature (1)..(351): SC16.41 VH
  CDS (1)..(351)
gaagtgaagcttgaggagtctggaggaggcttggtgcaatttggaggatccatgaaactctcttgtgctgcttctggattcacttttagtgatgcctggatggactgggtccgccagtctccagagaaggggcttgagtgggttgctgaaattagaaacaaagctaataatcatgcaacatattatcctgagtctgtgaaagggaggttcaccatctcaagagatgattccaaaagtagagtgtacctgcaaatgaacaacttaagagctgaagacactggcatttattactgtacgggttactcctcgtttgcttactggggccaagggactctggtcactgtctctgca

SEQ ID NO: 119 - protein, 117 aa, Mus musculus
EVKLEESGGGLVQFGGSMKLSCAASGFTFSDAWMDWVRQSPEKGLEWVAEIRNKANNHATYYPESVKGRFTISRDDSKSRVYLQMNNLRAEDTGIYYCTGYSSFAYWGQGTLVTVSA

SEQ ID NO: 120 - DNA, 336 bp, Mus musculus
  misc_feature (1)..(336): SC16.42 VL
  CDS (1)..(336)
gatgttttgatgacacagtctccactctccctgtctgtcagtcttggagatcaagcctccatctcttgtagatctagtcagaacattgtacacagtgatagatacacctatttagaatggtacctgcagaaaccaggccagtcgccaaaactcctgatatatggggtttccaaccgattttctggggtcccagacaggttcagtggcagtggatcagggacagatttcacactcaagatcagcagagtggaggctgaggatatgggagtttattactgctttcaaggtacacatgttccgtacacgttcggaggggggaccaagctggaaataaaa

SEQ ID NO: 121 - protein, 112 aa, Mus musculus
DVLMTQSPLSLSVSLGDQASISCRSSQNIVHSDRYTYLEWYLQKPGQSPKLLIYGVSNRFSGVPDRFSGSGSGTDFTLKISRVEAEDMGVYYCFQGTHVPYTFGGGTKLEIK

SEQ ID NO: 122 - DNA, 354 bp, Mus musculus
  misc_feature (1)..(354): SC16.42 VH
  CDS (1)..(354)
cagatccagttggtgcagtctggacctgaactgaagaagcctggagagacagtcaagatctcctgcaaggcttctgggtataccttcacaactgctggaatgcagtgggtgcaaaagatgccaggaaagggttttaagtggattggctggataaacacccactctggagagccaaaatatgcagatgacttcaagggacggtttgccttctctttggaaacctctgccagcactgcctatttacagataagcaacctcaaagacgaggacacggctacgtttttctgtgcgcccctatggtccgatagtagttttgcttactggggccaaggaactctggtcactgtctctgca

SEQ ID NO: 123 - protein, 118 aa, Mus musculus
QIQLVQSGPELKKPGETVKISCKASGYTFTTAGMQWVQKMPGKGFKWIGWINTHSGEPKYADDFKGRFAFSLETSASTAYLQISNLKDEDTATFFCAPLWSDSSFAYWGQGTLVTVSA

SEQ ID NO: 124 - DNA, 321 bp, Mus musculus
  misc_feature (1)..(321): SC16.45 VL
  CDS (1)..(321)
gaaatccagatgacccagtctccatcctctatgtctgcatctctgggagacagaataaccatcacttgccaggcaactcaagacattgttaagaatttaaactggtatcagcagaaaccagggaaacccccttcattcctgatctattatgcaactgaactggcagaaggggtcccagcaaggttcagtggcagtgggtctgggtcagactattctctgacaatcagcaacctggagtctgaagattttgcagactatcactgtctacagttttatgagtttccgttcacgttcggtgctgggaccaagctggagctgaaa

SEQ ID NO: 125 - protein, 107 aa, Mus musculus
EIQMTQSPSSMSASLGDRITITCQATQDIVKNLNWYQQKPGKPPSFLIYYATELAEGVPARFSGSGSGSDYSLTISNLESEDFADYHCLQFYEFPFTFGAGTKLELK

SEQ ID NO: 126 - DNA, 363 bp, Mus musculus
  misc_feature (1)..(363): SC16.45 VH
  CDS (1)..(363)
caggtccagctgcagcagtctggagctgacctggtaaggcctgggacttcagtgaaggtgtcctgcaaggcttctggatactccttcactaattacctgatagagtgggtaaagcagaggccaggacagggccttgagtggattggagtgattaatcctggaagtggtggaactcactacaatgagaaattcaaggacaaggcagttctgactgcagacaaatcctccactactgcccacatgcagctcagcagcctgacatctgatgactctgcggtctatttctgtgcaagatccccctatgattataacgatggtgctatggactactggggtcaaggaacctcagtcaccgtctcttca

SEQ ID NO: 127 - protein, 121 aa, Mus musculus
QVQLQQSGADLVRPGTSVKVSCKASGYSFTNYLIEWVKQRPGQGLEWIGVINPGSGGTHYNEKFKDKAVLTADKSSTTAHMQLSSLTSDDSAVYFCARSPYDYNDGAMDYWGQGTSVTVSS

SEQ ID NO: 128 - DNA, 336 bp, Mus musculus
  misc_feature (1)..(336): SC16.47 VL
  CDS (1)..(336)
gatgttgttctgacccagtctccactctctctgcctgtcaatattggagatcaagcctctatctcttgcaagtctactaagagtcttctgaatagtgatggattcacttatttggactggtatttgcagaggccaggccagtctccacaattcctaatatatttggtttctaatcgattttctggagttccagacaggttcagtggcagtgggtcaggaacagatttcacactcaagatcagcagagtggaggctgaggatttgggagtatattattgcttccagagtaactatcttccgctcacgttcggtgctgggaccaagctggagctgaga

SEQ ID NO: 129 - protein, 112 aa, Mus musculus
DVVLTQSPLSLPVNIGDQASISCKSTKSLLNSDGFTYLDWYLQRPGQSPQFLIYLVSNRFSGVPDRFSGSGSGTDFTLKISRVEAEDLGVYYCFQSNYLPLTFGAGTKLELR

SEQ ID NO: 130 - DNA, 357 bp, Mus musculus
  misc_feature (1)..(357): SC16.47 VH
  CDS (1)..(357)
gaggtccaactgcagcagtctggacctgagctggtgaagcctggggcttcagtgaagatatcctgcaaggcttctggttactcattcagtcgtttctatatgcactgggtgaagcaaagtcctgaaaatagtcttgagtggattggagagattaatcctagcactgggggtacaagctacaaccagaagttcaagggcaaggccacattaactgtagataaatcctccagcacagcctacatgcagctcaagagcctgacatctgaagagtctgcagtctattactgtactaggggttacgggagcaactgttacttcgatgtctggggcgcagggaccacggtcaccgtctccaca

SEQ ID NO: 131 - protein, 119 aa, Mus musculus
EVQLQQSGPELVKPGASVKISCKASGYSFSRFYMHWVKQSPENSLEWIGEINPSTGGTSYNQKFKGKATLTVDKSSSTAYMQLKSLTSEESAVYYCTRGYGSNCYFDVWGAGTTVTVST

SEQ ID NO: 132 - DNA, 321 bp, Mus musculus
  misc_feature (1)..(321): SC16.49 VL
  CDS (1)..(321)
gacatcaagatgacccagtctccatcttccatgtatgcatctctaggagagagagtcactatcacttgcaaggcgagtcaggacattaatagttatttaagctggttccagcagaaaccagggaaatctcctaagaccctgatctatcgagcaaacagattggtagatggggtcccatcaaggttcagtggcagtggatctgggcaagattattctctcaccatcaccagcctggagtatgaagatatgggaatttattattgtctacagtatgatgaatttccgctcacgttcggtgctgggaccaagctggagctgaaa

SEQ ID NO: 133 - protein, 107 aa, Mus musculus
DIKMTQSPSSMYASLGERVTITCKASQDINSYLSWFQQKPGKSPKTLIYRANRLVDGVPSRFSGSGSGQDYSLTITSLEYEDMGIYYCLQYDEFPLTFGAGTKLELK

SEQ ID NO: 134 - DNA, 351 bp, Mus musculus
  misc_feature (1)..(351): SC16.49 VH
  CDS (1)..(351)
caggttcaactgcagcagtctggacctgagctggtgaagcctgggactttagtgaagatatcctgcaaggcttctggttacaccttcacaagctacgatataaactgggtgaagcagaggcctggacagggacttgaatggattggatggatttatcctggagatggtaatactaagtacagtgagaaattcaagggcaaggccacactgactgcagacaaatcctccagcacagcctacatgcagctcaccagcctgacttctgagaactctgcagtctatttctgtgcaagagactatgattacccttttgcttactggggccaagggactctggtcactgtctctgca

SEQ ID NO: 135 - protein, 117 aa, Mus musculus
QVQLQQSGPELVKPGTLVKISCKASGYTFTSYDINWVKQRPGQGLEWIGWIYPGDGNTKYSEKFKGKATLTADKSSSTAYMQLTSLTSENSAVYFCARDYDYPFAYWGQGTLVTVSA

SEQ ID NO: 136 - DNA, 318 bp, Mus musculus
  misc_feature (1)..(318): SC16.50 VL
  CDS (1)..(318)
gatatccagatgacacagactacatcctccctgtctgcctctctgggagacagagtcaccatcagttgcagggcaagtcaggacattagcaattatttaaactggtatcagcagaaaccagatggaactgttaaactcctgatctactacacatcaagattacactcaggagtcccatcaaggttcagtggcagtgggtctggtacagattattctctcaccattagcaacctggagcaagaagatattgccacttacttttgccaacagggtaatacgcttcggacgttcggtggaggcaccaagctggaaatcaaa

SEQ ID NO: 137 - protein, 106 aa, Mus musculus
DIQMTQTTSSLSASLGDRVTISCRASQDISNYLNWYQQKPDGTVKLLIYYTSRLHSGVPSRFSGSGSGTDYSLTISNLEQEDIATYFCQQGNTLRTFGGGTKLEIK

SEQ ID NO: 138 - DNA, 363 bp, Mus musculus
  misc_feature (1)..(363): SC16.50 VH
  CDS (1)..(363)
gaagtgcagctggtggagtgtgggggatgcttagtgaagcctggagggtacctgaaactctcctgtgcagcctctggattcactttcagtagctatgccatgtcttgggttcgccagtctccagagaagaggctggagtgggtcgcagaaatcagtattggtggtagctacacctactatccagacactgtgacgggccgattcaccatctccagagacaatgccaagaacaccctgtacctggaaatgagcagtctgaggtctgaggacacggccatgtattactgtgcaagggagggctatgattacgacgtgagagctatggactactggggtcaaggaacctcagtcaccgtctcctca

SEQ ID NO: 139 - protein, 121 aa, Mus musculus
EVQLVECGGCLVKPGGYLKLSCAASGFTFSSYAMSWVRQSPEKRLEWVAEISIGGSYTYYPDTVTGRFTISRDNAKNTLYLEMSSLRSEDTAMYYCAREGYDYDVRAMDYWGQGTSVTVSS

SEQ ID NO: 140 - DNA, 321 bp, Mus musculus
  misc_feature (1)..(321): SC16.52 VL
  CDS (1)..(321)
gacatccagatgattcagtctccatcgtccatgtttgcctctctgggagacagagtcagtctctcttgtcgggctagtcagggcattagagggactttagactggtatcaacagaaaccaaatggaactattaaactcctgatctactccacatccaatttaaattctggtgtcccatcaaggttcagtggcagtgggtctgggtcagattattctctcaccatcagcagcctagagtctgaagattttgcagactattactgtctacagcgtaatgcgtatcctctcacgttcggtgctgggaccaagctggagctgaaa

SEQ ID NO: 141 - protein, 107 aa, Mus musculus
DIQMIQSPSSMFASLGDRVSLSCRASQGIRGTLDWYQQKPNGTIKLLIYSTSNLNSGVPSRFSGSGSGSDYSLTISSLESEDFADYYCLQRNAYPLTFGAGTKLELK

SEQ ID NO: 142 - DNA, 357 bp, Mus musculus
  misc_feature (1)..(357): SC16.52 VH
  CDS (1)..(357)
caggtgcagctgaaggagtcaggacctggcctggtggcgccctcacagagcctgtccatcacgtgcgctgtctctggattttcattaaccagctttgcaatacactggtttcgcaagcctccaggaaagggtctggagtggctgggagtaatatggactggtggaaccacaaattataattcggctctcatgtccagactgagcatcagcaaagacaactccaagagccaagttttcttaaaaatgaacagtctgcaaactgatgacacagccatgtactactgtgccagagacgattacgacaataattatgctatggactactggggtcaaggaacctcagtcaccgtctcctca

SEQ ID NO: 143 - protein, 119 aa, Mus musculus
QVQLKESGPGLVAPSQSLSITCAVSGFSLTSFAIHWFRKPPGKGLEWLGVIWTGGTTNYNSALMSRLSISKDNSKSQVFLKMNSLQTDDTAMYYCARDDYDNNYAMDYWGQGTSVTVSS

SEQ ID NO: 144 - DNA, 321 bp, Mus musculus
  misc_feature (1)..(321): SC16.55 VL
  CDS (1)..(321)
gacatcaagatgacccagtctccatcttccatgtatgcatctctaggagagagagtcactatcacttgcaaggcgagtcaggacattaatagctatttaaactggttccagcagaaaccagggaaatctcctaagaccctgatctatcgtgcaaacagattggtagatggggtcccatcaaggttcagtggcagtggatctgggcaagattattctctcaccatcagcagcctggagtatgaagatatgggaatttattattgtctacagtatgatgagtttccgtacacgttcggaggggggaccaagctggaaataaaa

SEQ ID NO: 145 - protein, 107 aa, Mus musculus
DIKMTQSPSSMYASLGERVTITCKASQDINSYLNWFQQKPGKSPKTLIYRANRLVDGVPSRFSGSGSGQDYSLTISSLEYEDMGIYYCLQYDEFPYTFGGGTKLEIK

SEQ ID NO: 146 - DNA, 351 bp, Mus musculus
  misc_feature (1)..(351): SC16.55 VH
  CDS (1)..(351)
gaggtgcagcttgttgagtctggtggaggattggtgcagcctaaagggtcattgaaactctcatgtgcagtctctgcattcaccttcactacctacgccatgaactgggtccgccaggctccaggaaagggtttggagtgggttgctcgcataagaaataaaagtaataattatgcaacatattatgccgattcagtgaaagacaggttcaccatctccagagatgattcacaaagcatgctctatctgcaaatgaacaacttgaaaattgaggacacagccatgtattactgtgtgttctactatgattacgtctactggggccaagggactctggtcactgtctctgca

SEQ ID NO: 147 - protein, 117 aa, Mus musculus
EVQLVESGGGLVQPKGSLKLSCAVSAFTFTTYAMNWVRQAPGKGLEWVARIRNKSNNYATYYADSVKDRFTISRDDSQSMLYLQMNNLKIEDTAMYYCVFYYDYVYWGQGTLVTVSA

SEQ ID NO: 148 - DNA, 321 bp, Mus musculus
  misc_feature (1)..(321): SC16.56 VL
  CDS (1)..(321)
agtattgtgatgacccagactcccaaattcctgcttgtatcagcaggagacagggttaccataacctgcaaggccagtcagagtgtgagtaatgatgtagtatggtaccaacagaagccagggcagtctcctaaactgctgatatactatgcatccaatcgctacactggagtccctgatcgcttcgctggcagtggatatgggacggatttctctttcaccatcagcactgtgcaggctgaagacctggcagtttatttctgtcagcaggattatacctctccgtggacgttcggtggaggcaccaagctggaaatcaga

SEQ ID NO: 149 - protein, 107 aa, Mus musculus
SIVMTQTPKFLLVSAGDRVTITCKASQSVSNDVVWYQQKPGQSPKLLIYYASNRYTGVPDRFAGSGYGTDFSFTISTVQAEDLAVYFCQQDYTSPWTFGGGTKLEIR

SEQ ID NO: 150 - DNA, 354 bp, Mus musculus
  misc_feature (1)..(354): SC16.56 VH
  CDS (1)..(354)
cagatccagttggtgcagtctggacctgaactgaagaagcctggagagacagtcaagatctcctgcaaggcttctgggtataccttcacaaactatggaatgaactgggtgaagcaggctccaggaaagggtttaaagtggatggcctggataaacacctacactggagagccaacatatgctgatgacttcaagggacggtttgccttctctttggaaacctctgccagcactgcctctttgcagatcatcaacctcaaaaatgaggacacggctacatatttctgtgcaaggatcggcgatagtagtccctctgactactgggggcagggcaccactctcacagtctcctca

SEQ ID NO: 151 - protein, 118 aa, Mus musculus
QIQLVQSGPELKKPGETVKISCKASGYTFTNYGMNWVKQAPGKGLKWMAWINTYTGEPTYADDFKGRFAFSLETSASTASLQIINLKNEDTATYFCARIGDSSPSDYWGQGTTLTVSS

SEQ ID NO: 152 - DNA, 321 bp, Mus musculus
  misc_feature (1)..(321): SC16.57 VL
  CDS (1)..(321)
gacattgtgatgacccagtctcacaaattcatgtccatatcagtaggagacagggtcagcatcacctgcaaggccagtcaggatgtgagtatttttgtagcctggtatcaacagaaaccaggacaatctcctaaactactgatttactcggcatcctaccggtacactggagtccctgatcgcttcactggcagtggatctgggacggatttcattttcaccatcagcagtgtgcaggctgaagacctggcagtttactactgtcagcaacattatggtactccattcacgttcggctcggggacaaagttgaaaataaga

SEQ ID NO: 153 - protein, 107 aa, Mus musculus
DIVMTQSHKFMSISVGDRVSITCKASQDVSIFVAWYQQKPGQSPKLLIYSASYRYTGVPDRFTGSGSGTDFIFTISSVQAEDLAVYYCQQHYGTPFTFGSGTKLKIR

SEQ ID NO: 154 - DNA, 354 bp, Mus musculus
  misc_feature (1)..(354): SC16.57 VH
  CDS (1)..(354)
gaagtgaaactggtggagtctgggggagacttagtgaagcctggagggtccctaaaactctcctgtgcagcctctggattcgctttcagtagttatgacatgtcttgggttcgccagactccggagaagagactggagtgggtcgcaaccattagcagtggtggtagttacacctattatccagacagtgtgaagggccgattcaccatctccagagacaatgtcagggacaccctgtacctgcaaatgagcagtttgaggtctgaggacacggccttgtattactgtgcaagacaggcaattgggacgtactttgactactggggccaaggcaccactctcacagtctcctca

SEQ ID NO: 155 - protein, 118 aa, Mus musculus
EVKLVESGGDLVKPGGSLKLSCAASGFAFSSYDMSWVRQTPEKRLEWVATISSGGSYTYYPDSVKGRFTISRDNVRDTLYLQMSSLRSEDTALYYCARQAIGTYFDYWGQGTTLTVSS

SEQ ID NO: 156 - DNA, 321 bp, Mus musculus
  misc_feature (1)..(321): SC16.58 VL
  CDS (1)..(321)
gacatccagatgactcagtctccagcctccctatcttcatctgtgggagaaactgtcaccatcacatgtcgagcaagtgagaatatttacagttatttagcatggtatcagcagaaacagggaaaatctcctcagctcctggtctataatgcaaaaactttagcagaaggtgtgccatcaaggttcagtggcagtggatcaggcacacagttttctctgaagatcaacagcctgcagcctgaagattttgggacttattactgtcaacatcattatgattctccgctcacgttcggtgctgggaccaagctggagctgaga

SEQ ID NO: 157 - protein, 107 aa, Mus musculus
DIQMTQSPASLSSSVGETVTITCRASENIYSYLAWYQQKQGKSPQLLVYNAKTLAEGVPSRFSGSGSGTQFSLKINSLQPEDFGTYYCQHHYDSPLTFGAGTKLELR

SEQ ID NO: 158 - DNA, 360 bp, Mus musculus
  misc_feature (1)..(360): SC16.58 VH
  CDS (1)..(360)
gatgtgcagctggtggagtctgggggaggcttagtgcagcctggagggtcccggaaactctcctgtgcagcctctggattcactttcagtagctttggaatgcactgggttcgtcaggctccagagaaggggctggagtgggtcgcatacattagtagtggcagtagtaacatctactatgcagacacagtgaagggccgattcaccatctccagagacaatcccaagaacaccctgttcctgcaaatgaccagtctaaggtctgaggacacggccatgtattactgtgcaagaggctactatggtaactacgatgctatggactactggggtcaaggaacctcagtcaccgtctcctca

SEQ ID NO: 159 - protein, 120 aa, Mus musculus
DVQLVESGGGLVQPGGSRKLSCAASGFTFSSFGMHWVRQAPEKGLEWVAYISSGSSNIYYADTVKGRFTISRDNPKNTLFLQMTSLRSEDTAMYYCARGYYGNYDAMDYWGQGTSVTVSS

SEQ ID NO: 160 - DNA, 339 bp, Mus musculus
  misc_feature (1)..(339): SC16.61 VL
  CDS (1)..(339)
gatattgtgatgacacagtctacatcctccctggctatgtcagtaggacagaaggtcactatgagctgcaagtccagtcagagccttttaaatagtagcaatcaaaagaattatttggcctggtaccagcaggaaccaggacagtctcctaaacttctggtatcctttgcatccactagggaatctggggtccctgatcgcttcacaggcagtggatctgggacagatttcactcttaccatcagcggtgtgcaggctgaagacctggcagtttattactgtcagcaacattatagcattccgctcacgttcggtgctggaaccaagctggagctgaaa

SEQ ID NO: 161 - protein, 113 aa, Mus musculus
DIVMTQSTSSLAMSVGQKVTMSCKSSQSLLNSSNQKNYLAWYQQEPGQSPKLLVSFASTRESGVPDRFTGSGSGTDFTLTISGVQAEDLAVYYCQQHYSIPLTFGAGTKLELK

SEQ ID NO: 162 - DNA, 360 bp, Mus musculus
  misc_feature (1)..(360): SC16.61 VH
  CDS (1)..(360)
gaggtcctgctccaacggtctggacctgacctggtgaagcctggggcttcagtgacgataccctgcaaggcttctggatacacattcactgactacaacatggactgggtgaagcagagccatggaaagagccttgagtggattggaaatattaatacttacaatggtggtactatctacaaccagaagttcaagggcaaggccacattgactgtagacaagccctccagcacagcctacatggagctccgcagcctgacatctgaggacactgcagtctattactgtgcaagacgtctacggtatgggggacactactttgactactggggccaaggcaccgctctcacagtctcctca

SEQ ID NO: 163 - protein, 120 aa, Mus musculus
EVLLQRSGPDLVKPGASVTIPCKASGYTFTDYNMDWVKQSHGKSLEWIGNINTYNGGTIYNQKFKGKATLTVDKPSSTAYMELRSLTSEDTAVYYCARRLRYGGHYFDYWGQGTALTVSS

SEQ ID NO: 164 - DNA, 321 bp, Mus musculus
  misc_feature (1)..(321): SC16.62 VL
  CDS (1)..(321)
gacatcaagatgacccagtctccatcttccatgtatgcatctctaggagagagagtcactatcacttgcaaggcgagtcaggacattaatagctttttaagctggttccagcggaaaccagggaaatctccgaagaccctgatctatcgtgcaaacagattagtagatggagtcccatcaaggttcactggcagtggatctgggcaagaattttctctcaccatcagcagcctggagtatgaagatttgggaatttattattgtcttcagtatgatgagtttccgtacacgttcggaggggggaccaagctggaaataaaa

SEQ ID NO: 165 - protein, 107 aa, Mus musculus
DIKMTQSPSSMYASLGERVTITCKASQDINSFLSWFQRKPGKSPKTLIYRANRLVDGVPSRFTGSGSGQEFSLTISSLEYEDLGIYYCLQYDEFPYTFGGGTKLEIK

SEQ ID NO: 166 - DNA, 351 bp, Mus musculus
  misc_feature (1)..(351): SC16.62 VH
  CDS (1)..(351)
gaagtgatgctggtagagtctgggggagacttagtgaagcctggagggtccctgaaactctcctgtgcagcctctggattcactttcagtagctatgccatgtcttgggttcgccagactccggagaagaggctggagtgggtcgcatacattagcggtggtggtgatcacatctattatccagacagtgtgaggggccgattcaccatctccagagacaatgccaaggacaccctgtacctgcaaatgagcagtctgaggtctgaggacacggccttgtatgactgtgcaagagtgagagactggtacttcgatgtctggggcgcagggaccacggtcaccgtctcctca

SEQ ID NO: 167 - protein, 117 aa, Mus musculus
EVMLVESGGDLVKPGGSLKLSCAASGFTFSSYAMSWVRQTPEKRLEWVAYISGGGDHIYYPDSVRGRFTISRDNAKDTLYLQMSSLRSEDTALYDCARVRDWYFDVWGAGTTVTVSS

SEQ ID NO: 168 - DNA, 318 bp, Mus musculus
  misc_feature (1)..(318): SC16.63 VL
  CDS (1)..(318)
caaattgttctcacccagtctccagcaatcatgtctgcatctccaggggagaaggtcaccatgacctgcagtgccagctcaagtgtcagttacatgtactggtaccagcagaagtcaggcacctcccccaaaagatggatttatgacacatccaaactggcttctggagtccctgctcgcttcagtggcagtgggtctgggacctcttactctctcacaatcagcagcatggaggctgaagatgctgccacttattactgccagcagtggagtagtaacccgtacacgttcggaggggggaccaagctggaaataaar

SEQ ID NO: 169 - protein, 106 aa, Mus musculus
QIVLTQSPAIMSASPGEKVTMTCSASSSVSYMYWYQQKSGTSPKRWIYDTSKLASGVPARFSGSGSGTSYSLTISSMEAEDAATYYCQQWSSNPYTFGGGTKLEIK

SEQ ID NO: 170 - DNA, 342 bp, Mus musculus
  misc_feature (1)..(342): SC16.63 VH
  CDS (1)..(342)
caggttcagctgcagcagtctggaactgagctgctgaggcctggggcctcagtgaagatatcctgcaaggctactggctacacattcagtagctactggatggagtgggtaaagcagaggcctggacatggccttgagtggattggagagattttacctggaagtggtactactcagtacaatgagaagttcaagggcaaggccaccttcactgcagatacatcctccaacacagcctacatgcatctcagcagcctgacatctgaggactctgccgtctattactgtgcaagagggactaactctctctggggccaagggactctggtcactgtctctgca

SEQ ID NO: 171 - protein, 114 aa, Mus musculus
QVQLQQSGTELLRPGASVKISCKATGYTFSSYWMEWVKQRPGHGLEWIGEILPGSGTTQYNEKFKGKATFTADTSSNTAYMHLSSLTSEDSAVYYCARGTNSLWGQGTLVTVSA

SEQ ID NO: 172 - DNA, 318 bp, Mus musculus
  misc_feature (1)..(318): SC16.65 VL
  CDS (1)..(318)
caaattgttctcacccagtctccagcactcatgtctgcatctccaggggagaaggtcaccatgacctgcagtgtcacctcaagtgtaagttacatgtactggtaccagcagaagcctagatcctcccccaaaccctggatttatctcacatccaacctggcttctggagtccctgctcgcttcagtggcagtgggtctgggacctcttactctctcacaatcagcagcgtggaggctgaagatgctgccacttattactgccagcagtggaggaataacccattcacgttcggctcggggacaaaggtggaaataaaa

SEQ ID NO: 173 - protein, 106 aa, Mus musculus
QIVLTQSPALMSASPGEKVTMTCSVTSSVSYMYWYQQKPRSSPKPWIYLTSNLASGVPARFSGSGSGTSYSLTISSVEAEDAATYYCQQWRNNPFTFGSGTKVEIK

SEQ ID NO: 174 - DNA, 372 bp, Mus musculus
  misc_feature (1)..(372): SC16.65 VH
  CDS (1)..(372)
caggttactctgaaagagtctggccctgggatattgcagccctcccagaccctcagtctgacttgttctttctctgggttttcactgagcacttctggtatgggtgtaggctggattcgtcagccatcagggaagggtctggagtggctggcactcatttggtgggatgatgtcaagcgctataatccagccctgaagagtcgactgactatctccaaggatgcctccagcagccaggtcttcctcaagatcgccagtgtggacactgcagatactgccacatactactgtgctcgaatagcttcctatgattacgacgtagtctatgctatggactactggggtcaaggaacctcagtcagcgtctcctca

SEQ ID NO: 175 - protein, 124 aa, Mus musculus
QVTLKESGPGILQPSQTLSLTCSFSGFSLSTSGMGVGWIRQPSGKGLEWLALIWWDDVKRYNPALKSRLTISKDASSSQVFLKIASVDTADTATYYCARIASYDYDVVYAMDYWGQGTSVSVSS

SEQ ID NO: 176 - DNA, 327 bp, Mus musculus
  misc_feature (1)..(327): SC16.67 VL
  CDS (1)..(327)
caggctgttgtgactcaggaatctgcactcaccacatcacctggtgaaacagtcacactcacttgtcgctcaagtactggggctgttacaactagtaactatgccaactggatccaagaaaaaccagatcatttattcactggtctaataggtggtaccaacaaccgagctccaggtgttcctgccagattctcaggctccctgattggagacaaggctgccctcaccatcacaggggcacagactgaggatgaggcaatatatttctgtggtctatggtacagcaaccatttggtgttcggtggaggaaccaaactgactgtccta

SEQ ID NO: 177 - protein, 109 aa, Mus musculus
QAVVTQESALTTSPGETVTLTCRSSTGAVTTSNYANWIQEKPDHLFTGLIGGTNNRAPGVPARFSGSLIGDKAALTITGAQTEDEAIYFCGLWYSNHLVFGGGTKLTVL

SEQ ID NO: 178 - DNA, 351 bp, Mus musculus
  misc_feature (1)..(351): SC16.67 VH
  CDS (1)..(351)
gaggtgcagcttgttgagactggtggaggattggtgcagcctaaagggtcattgaaactctcatgtgcagtctctgcattcaccttcactacctacgccatgaactgggtccgccaggctccaggaaagggtttggagtgggttgctcgcataagaaataaaagtaataattatgcaacatattatgccgattcagtgaaagacaggttcaccatctccagagatgattcacaaagcatgctctatctgcaaatgaacaacttgaaaattgaggacacagccatgtattactgtgtgttctactatgattacgtctactggggccaagggactctggtcactgtctctgca

SEQ ID NO: 179 - protein, 117 aa, Mus musculus
EVQLVETGGGLVQPKGSLKLSCAVSAFTFTTYAMNWVRQAPGKGLEWVARIRNKSNNYATYYADSVKDRFTISRDDSQSMLYLQMNNLKIEDTAMYYCVFYYDYVYWGQGTLVTVSA

SEQ ID NO: 180 - DNA, 321 bp, Mus musculus
  misc_feature (1)..(321): SC16.68 VL
  CDS (1)..(321)
gaaacaactgtgacccagtctccagcattcctgtccgtggctacaggagaaaaagtcactatcagatgcataaccagcactgatattgatgatgatatgaactggtaccagcagaagccaggggaacctcctaatgtccttatttcagaaggcaatactcttcgtcctggagtcccatcccgattctccagcagtggctatggcacagattttgtttttacaattgaaaacacgctctcagaagatgttgcagattactactgtttgcaaagtgataacatgcctctcacgttcggtgctgggaccaagctggagctgaaa

SEQ ID NO: 181 - protein, 107 aa, Mus musculus
ETTVTQSPAFLSVATGEKVTIRCITSTDIDDDMNWYQQKPGEPPNVLISEGNTLRPGVPSRFSSSGYGTDFVFTIENTLSEDVADYYCLQSDNMPLTFGAGTKLELK

SEQ ID NO: 182 - DNA, 363 bp, Mus musculus
  misc_feature (1)..(363): SC16.68 VH
  CDS (1)..(363)
caggtgcaactgcagcagcctggggctgagctggtgaagcctggggcctcagtgaagatgtcctgcaaggcttctggctacacatttaccaattacaatatgcactgggtaaagcagacacctggacagggcctggaatggattggggctatttttccaggaaatggtggtacttcctacaatcagaagttcaaaggcaaggccacattgactgcagacaaatcctccagcacagcctacatgcagctcaccagtttgacatctggggactctgcagtctattactgtgcaagatggggctacggtagtggcctttatgctatggactactggggtcaaggaacctcagtcaccgtctcctca

SEQ ID NO: 183 - protein, 121 aa, Mus musculus
QVQLQQPGAELVKPGASVKMSCKASGYTFTNYNMHWVKQTPGQGLEWIGAIFPGNGGTSYNQKFKGKATLTADKSSSTAYMQLTSLTSGDSAVYYCARWGYGSGLYAMDYWGQGTSVTVSS

SEQ ID NO: 184 - DNA, 318 bp, Mus musculus
  misc_feature (1)..(318): SC16.72 VL
  CDS (1)..(318)
gaaaatgtactcacccagtctccagcaatcatgtctgcatctctaggggagaaggtcaccatgagctgcagggccagctcaagtgtaaattacatgtcctggtaccagcagaagtcagatgcctcccccaaactatggatttattacacatccaacctggctcctggagtcccagctcgcttcagtggcagtgggtctgggaactcttattctctcacaatcagcagcatggagggtgaagatgctgccacttattactgccagcagtttactagttccccgtacacgttcggaggggggaccaagctggaaataaaa

SEQ ID NO: 185 - protein, 106 aa, Mus musculus
ENVLTQSPAIMSASLGEKVTMSCRASSSVNYMSWYQQKSDASPKLWIYYTSNLAPGVPARFSGSGSGNSYSLTISSMEGEDAATYYCQQFTSSPYTFGGGTKLEIK

SEQ ID NO: 186 - DNA, 351 bp, Mus musculus
  misc_feature (1)..(351): SC16.72 VH
  CDS (1)..(351)
gaggtccagctgcagcagtctggacctgagctggtaaagcctggggcttcagtgaagatgtcctgcaaggcttctggatacacattcactagctatgttatgcactgggtgaagcagaagcctgggcagggccttgagtggattggatatattaatccttacaatgatggtactaagtacaatgagaagttcaaaggcaaggccacactgacttcagacaaatcctccagcacagcctacatggagctcagcagcctgacctctgaggactctgcggtctattactgtgcaagattgaggtcgagggctatggactactggggtcaaggaacctcagtcaccgtctcctca

SEQ ID NO: 187 - protein, 117 aa, Mus musculus
EVQLQQSGPELVKPGASVKMSCKASGYTFTSYVMHWVKQKPGQGLEWIGYINPYNDGTKYNEKFKGKATLTSDKSSSTAYMELSSLTSEDSAVYYCARLRSRAMDYWGQGTSVTVSS

SEQ ID NO: 188 - DNA, 321 bp, Mus musculus
  misc_feature (1)..(321): SC16.73 VL
  CDS (1)..(321)
gacatccagatgacccagtctccatcctccttatctgcctctctgggagagagagtcagtctcacttgtcgggcaagtcaggacattggttatagcttaaactggcttcagcaggaaccagatggaactattaaacgcctgatctacgccacatccagtttagattctggtgtccccaaaaggttcagtggcagtaggtctgggtcagattattctctcaccatcagcagccttgagtctgaagattttgtagactattactgtctacaatatgctagttctccgtggacgttcggtggaggcaccaagctggaaatcaaa

SEQ ID NO: 189 - protein, 107 aa, Mus musculus
DIQMTQSPSSLSASLGERVSLTCRASQDIGYSLNWLQQEPDGTIKRLIYATSSLDSGVPKRFSGSRSGSDYSLTISSLESEDFVDYYCLQYASSPWTFGGGTKLEIK

SEQ ID NO: 190 - DNA, 369 bp, Mus musculus
  misc_feature (1)..(369): SC16.73 VH
  CDS (1)..(369)
caggtgcagctgcagcagtctggagctgagctgatgaagcctggggcctcagtgaagatatcctgcaaggctaatggctacacattcagtagctactggatagagtggttaaggcagaggcctggacatggccttgagtggattggagagattttacctggaagtgataatagtaattataatgagaagttcaagggcaaggccacattcactgcagatacatcctccaacacagcctacatgcaactcagcagcctgacatctgaggaatctgccgtctattactgtacaaggggattacgacgagacggctcatattactatgttatggaacattggggtcaaggaacctcagtcaccgtctcctca

SEQ ID NO: 191 - protein, 123 aa, Mus musculus
QVQLQQSGAELMKPGASVKISCKANGYTFSSYWIEWLRQRPGHGLEWIGEILPGSDNSNYNEKFKGKATFTADTSSNTAYMQLSSLTSEESAVYYCTRGLRRDGSYYYVMEHWGQGTSVTVSS

SEQ ID NO: 192 - DNA, 321 bp, Mus musculus
  misc_feature (1)..(321): SC16.78 VL
  CDS (1)..(321)
gacatcaagatgacccagtctccatcttccatgtatgcatctctaggagagagagtcactatcacttgcaaggcgagtcaggacattaatagctatttaagctggttccagcagaagccagggagatctcctaagaccctgatctatcgtgcaaacagattggtagatggggtcccatcaaggttcagtggcagtggatctgggcaagattattctctcaccatcagcagcctggactatgaagatatgggaatttattattgtctacagtatgatgaatttccattcacgttcggctcggggacaaagttggarathaar

SEQ ID NO: 193 - protein, 107 aa, Mus musculus
DIKMTQSPSSMYASLGERVTITCKASQDINSYLSWFQQKPGRSPKTLIYRANRLVDGVPSRFSGSGSGQDYSLTISSLDYEDMGIYYCLQYDEFPFTFGSGTKLEIK

SEQ ID NO: 194 - DNA, 357 bp, Mus musculus
  misc_feature (1)..(357): SC16.78 VH
  CDS (1)..(357)
gaagtgaagctggtggagtctgggggaggcttagtgaagcctggagggtccctgaaactctcctgtgcagcctctggattcactttcggtcgctatgtcatgtcttgggttcgccagactccagaaaagaaactggagtgggtcgcatccattactagtggtggtactacctactatccagacagtgtgaagggccgattcaccatctccagagataatgccaggaacatcctgtacctacaaatgagcagtctgaggtctgaggacacggccatgtattactgtgcaagagtctactatcattacgacgacatctttgcttactggggccaagggactctggtcactgtctctgca

SEQ ID NO: 195 - protein, 119 aa, Mus musculus
EVKLVESGGGLVKPGGSLKLSCAASGFTFGRYVMSWVRQTPEKKLEWVASITSGGTTYYPDSVKGRFTISRDNARNILYLQMSSLRSEDTAMYYCARVYYHYDDIFAYWGQGTLVTVSA

SEQ ID NO: 196 - DNA, 336 bp, Mus musculus
  misc_feature (1)..(336): SC16.79 VL
  CDS (1)..(336)
gacattgtgatgtcacagtctccatcctccctggctgtgtcagcaggagagaaggtcactatgagctgcaaatccagtcagagtctgctcaacagtagaacccgaaagaactacttggcttggtaccagcagaaaccagggcagtctcctaaactgctgatctactgggcatccactagggaatctggggtccctgatcgcttcacaggcagtggatctgggacagatttcactctcaccatcagcagtgtgcaggctgaagacctggcagtttattactgcaagcaatcttataatctttacacgttcggaggggggaccaagctgaaaataaaa

SEQ ID NO: 197 - protein, 112 aa, Mus musculus
DIVMSQSPSSLAVSAGEKVTMSCKSSQSLLNSRTRKNYLAWYQQKPGQSPKLLIYWASTRESGVPDRFTGSGSGTDFTLTISSVQAEDLAVYYCKQSYNLYTFGGGTKLKIK

SEQ ID NO: 198 - DNA, 348 bp, Mus musculus
  misc_feature (1)..(348): SC16.79 VH
  CDS (1)..(348)
gaggtccagctgcaacagtctggacctgagctggtgaagcctggggcttcagtgaagatatcctgcaagacttctggatacacattcactgaatacaccatgcactgggtgaagcagagccatggaaagagccttgagtggattggaggtattaatcctaacaatggtggtactagctacaaccagaagttcaagggcaaggccacattgactgtagacaagtcctccagcacagcctacatggagctccgcagcctgacatctgaggattctgcagtctattactgtgcaaggggtcccgcctggtttgcttactggggccaagggactctggtcactgtctctgca

SEQ ID NO: 199 - protein, 116 aa, Mus musculus
EVQLQQSGPELVKPGASVKISCKTSGYTFTEYTMHWVKQSHGKSLEWIGGINPNNGGTSYNQKFKGKATLTVDKSSSTAYMELRSLTSEDSAVYYCARGPAWFAYWGQGTLVTVSA

SEQ ID NO: 200 - DNA, 321 bp, Mus musculus
  misc_feature (1)..(321): SC16.80 VL
  CDS (1)..(321)
gaaacaactgtgacccagtctccagcatccctgtccatggctataggagaaaaagtcaccatcagatgcataaccagcactgatattgatgatgatatgatctggtaccagcagaagccaggggaacctcctaagctccttatttcagaaggcaatactcttcgtcctggagtcccatcccgattctccagcagtggctatggtacagattttgtttttacaattgaaaacatgctctcagaagatgttgccgattactactgtttgaaaagggatgacttgccttacacgttcggcggggggacacaggtggaaattaaa

SEQ ID NO: 201 - protein, 107 aa, Mus musculus
ETTVTQSPASLSMAIGEKVTIRCITSTDIDDDMIWYQQKPGEPPKLLISEGNTLRPGVPSRFSSSGYGTDFVFTIENMLSEDVADYYCLKRDDLPYTFGGGTQVEIK

SEQ ID NO: 202 - DNA, 351 bp, Mus musculus
  misc_feature (1)..(351): SC16.80 VH
  CDS (1)..(351)
gaggtccagctgcaacagtctggacctgagctggtgaagcctggaggttcaaagaagatatcctgcaaggcttctggttactcattcactggctacagtatgaactgggtgaagcagagccatggaaagaaccttgagtggattggacttattaatccttacagtggtggtactatctacaaccagaaattcaagggcaaggccacattaactgtagacaagtcatccagcacagcctacatggagctcctcagtctgacatctgaggactctgcagtctattactgtgcaagaaggagtgattacccgttagtttactggggccaagggactctggtcactgtctctgca

SEQ ID NO: 203 - protein, 117 aa, Mus musculus
EVQLQQSGPELVKPGGSKKISCKASGYSFTGYSMNWVKQSHGKNLEWIGLINPYSGGTIYNQKFKGKATLTVDKSSSTAYMELLSLTSEDSAVYYCARRSDYPLVYWGQGTLVTVSA

SEQ ID NO: 204 - DNA, 324 bp, Mus musculus
  misc_feature (1)..(324): SC16.81 VL
  CDS (1)..(324)
caaattgttctcacccagtctccagcaatcatgtctgcatctctaggggaacgggtcaccctgacctgcactgccagctcaagtgtaagttccagttacttgcactggtaccagcagaagccaggatcctcccccaaactctggatttatagcacatccaacctggcttctggagtcccaactcgcttcagtggcagtgggtctgggacctcttactctctcagaatcagcagcatggaggctgaagatgctgccacttattactgccaccagtataatcgttccccgctcacgttcggtgctgggaccaagctggagctgaaa

SEQ ID NO: 205 - protein, 108 aa, Mus musculus
QIVLTQSPAIMSASLGERVTLTCTASSSVSSSYLHWYQQKPGSSPKLWIYSTSNLASGVPTRFSGSGSGTSYSLRISSMEAEDAATYYCHQYNRSPLTFGAGTKLELK

SEQ ID NO: 206 - DNA, 351 bp, Mus musculus
  misc_feature (1)..(351): SC16.81 VH
  CDS (1)..(351)
caggtgcagctgaaggagtcaggacctgtcctggtggcgccctcacagagcctgtccatcacttgcactgtctctgggttttcattaaccagctatggtgtacactgggttcgccagcctccaggaaagggtctggagtggctgggagtaatttgggctggtggaagtacaaattataattcagctctcatgtccagactgagcatcagcaaagacaactccaagagccaagttttcttaaaaatgaacagtctgcaaactgatgacacagccatgtactactgtgccaaacagggcaacttctatgctatggactactggggtcaaggaacctcagtcaccgtctcctca

SEQ ID NO: 207 - protein, 117 aa, Mus musculus
QVQLKESGPVLVAPSQSLSITCTVSGFSLTSYGVHWVRQPPGKGLEWLGVIWAGGSTNYNSALMSRLSISKDNSKSQVFLKMNSLQTDDTAMYYCAKQGNFYAMDYWGQGTSVTVSS

SEQ ID NO: 208 - DNA, 318 bp, Mus musculus
  misc_feature (1)..(318): SC16.84 VL
  CDS (1)..(318)
gacatccagatgacacagtctccatcctcactgtctgcatctctgggaggcaaagtcaccatcacttgcaaggcaagccaagacattaagaagtatatagcttggtaccaacacaagcctggaaaaggtcctaggctactcatacattacacatctacattagagccaggcatcccatcaaggttcagtggaagtgggtctgggagagattattccttcagcatcagcaacctggagcctgaagatattgcaacttattattgtctacaatatgatattctgtggacgttcggtggaggcaccaagctggaaatcaaa

SEQ ID NO: 209 - protein, 106 aa, Mus musculus
DIQMTQSPSSLSASLGGKVTITCKASQDIKKYIAWYQHKPGKGPRLLIHYTSTLEPGIPSRFSGSGSGRDYSFSISNLEPEDIATYYCLQYDILWTFGGGTKLEIK

SEQ ID NO: 210 - DNA, 363 bp, Mus musculus
  misc_feature (1)..(363): SC16.84 VH
  CDS (1)..(363)
gaggtccagctgcaacagtctggacctgagctggtgaagcctggagcttcaatgaagatatcctgcaaggcttctggttactcattcactggctacaccatgaactgggtgaagcagagccatggaaagaaccttgagtggattggacttattaatccttacaatggtggtactacctacaaccagaagttcaagggcaaggccacattaactgtagacaagtcatccagcacagcctacatggagctcctcagtctgacatctgaggactctgcagtctattactgtgcattaggttactatggtaactacaggaggtacttcgatgtctggggcgcagggaccacggtcaccgtctcctca

SEQ ID NO: 211 - protein, 121 aa, Mus musculus
EVQLQQSGPELVKPGASMKISCKASGYSFTGYTMNWVKQSHGKNLEWIGLINPYNGGTTYNQKFKGKATLTVDKSSSTAYMELLSLTSEDSAVYYCALGYYGNYRRYFDVWGAGTTVTVSS

SEQ ID NO: 212 - DNA, 324 bp, Mus musculus
  misc_feature (1)..(324): SC16.88 VL
  CDS (1)..(324)
gaaaatgtgctcacccagtctccagcaataatggctgcctctctggggcagaaggtcaccatgacctgcagtgccagctcaagtgtaagttccagttacttgcactggtaccagcagaagtcaggcgcttcccccaaacccttgattcataggacatccaacctggcttctggagtcccagctcgcttcagtggcagtgggtctgggacctcttactctctcacaatcagcagcgtggaggctgaagatgatgcaacttattactgccggcagtggagtggttacccgtggacgttcggtggaggcaccaagctggaaatcaaa

SEQ ID NO: 213 - protein, 108 aa, Mus musculus
ENVLTQSPAIMAASLGQKVTMTCSASSSVSSSYLHWYQQKSGASPKPLIHRTSNLASGVPARFSGSGSGTSYSLTISSVEAEDDATYYCRQWSGYPWTFGGGTKLEIK

SEQ ID NO: 214 - DNA, 357 bp, Mus musculus
  misc_feature (1)..(357): SC16.88 VH
  CDS (1)..(357)
caggttcagctgcagcagtctggggctgagctggcaagacctggggcttcagtgaagttgtcctgcaaggcttctggctacacctgtactagctactggatgcagtgggtaaaacagaggcctggacagggtctggaatggattggggctatttatcctggagatggtgatactaggtacactcagaagttcaagggcaaggccacattgactgcagataaatcctccagcacagcctacatgcaactcagcagcttggcatctgaggactctgcggtctattactgtgcaagggggaggcggacggaggcctggtttgcttactggggccaagggactctggtcactgtctctgca

SEQ ID NO: 215 - protein, 119 aa, Mus musculus
QVQLQQSGAELARPGASVKLSCKASGYTCTSYWMQWVKQRPGQGLEWIGAIYPGDGDTRYTQKFKGKATLTADKSSSTAYMQLSSLASEDSAVYYCARGRRTEAWFAYWGQGTLVTVSA

SEQ ID NO: 216 - DNA, 324 bp, Mus musculus
  misc_feature (1)..(324): SC16.101 VL
  CDS (1)..(324)
caaattgttctcacccagtctccagcaatcatgtctgcatctctaggggaacgggtcaccatgacctgcactgccagctcaagtgtaagttccagttacttgcactggtaccagcagaagccaggatcctcccccaaactctggatttatagcacatccaacctggcttctggagtcccagctcgcttcagtggcagtgagtctgggacctcttactctctcacaatcagcaacatggaggctgaggatgctgccacttattactgccaccagtatcatcgttccccattcacgttcggctcggggacaaagttggaaataaaa

SEQ ID NO: 217 - protein, 108 aa, Mus musculus
QIVLTQSPAIMSASLGERVTMTCTASSSVSSSYLHWYQQKPGSSPKLWIYSTSNLASGVPARFSGSESGTSYSLTISNMEAEDAATYYCHQYHRSPFTFGSGTKLEIK

SEQ ID NO: 218 - DNA, 360 bp, Mus musculus
  misc_feature (1)..(360): SC16.101 VH
  CDS (1)..(360)
caggttactctgaaagagtctggccctgggatattgcagccctcccagaccctcagtctgacttgttctttctctggattttcactgagcacttctggtatgggcgtaggctggattcgtcagccatcagggaagggtctggagtggctggcacacatttggtgggatgatgtcaagcgctataacccagcccttaagagccgactgactatctccaaggatgcctccagcagccaggtattcctcaagatcgccagtgtggacactgcagaaactgccacatactactgtgcccacatcctcgaccgggcttactactttgactactggggccaaggcaccactctcacagtcacctca

SEQ ID NO: 219 - protein, 120 aa, Mus musculus
QVTLKESGPGILQPSQTLSLTCSFSGFSLSTSGMGVGWIRQPSGKGLEWLAHIWWDDVKRYNPALKSRLTISKDASSSQVFLKIASVDTAETATYYCAHILDRAYYFDYWGQGTTLTVTS

SEQ ID NO: 220 - DNA, 333 bp, Mus musculus
  misc_feature (1)..(333): SC16.103 VL
  CDS (1)..(333)
gacattgtgctgacacagtctcctgcttccttagctgtatctctggggcagagggccaccatctcatgcagggccagcaaaagtgtcagtacatctggctatagttatatgcactggtaccaacagaaaccaggacagccacccaaactcctcatctatcttgcatccaacctagaatctggggtccctgccaggttcagtggcagtgggtctgggacagacttcaccctcaacatccatcctgtggaggaggaggatgctgcaacctattactgtcagcacagtagggagcttcctctcacgttcggtgctgggaccaagctggagctgaaa

SEQ ID NO: 221 - protein, 111 aa, Mus musculus
DIVLTQSPASLAVSLGQRATISCRASKSVSTSGYSYMHWYQQKPGQPPKLLIYLASNLESGVPARFSGSGSGTDFTLNIHPVEEEDAATYYCQHSRELPLTFGAGTKLELK

SEQ ID NO: 222 - DNA, 357 bp, Mus musculus
  misc_feature (1)..(357): SC16.103 VH
  CDS (1)..(357)
caagttactctaaaagagtctggccctgggatattgaagccctcacagaccctcagtctgacttgttctttctctgggttttcactgagcacttctggtatgggtataggctggattcgtcagccttcagggaagggtctggagtggctggcacacatttggtgggatgatgataagtactataacccatccctgaagagccagctcacaatctccaaggattcctccagaaaccaggttttcctcaagatcaccagtgtggacactgcagatactgccacttactactgtgctcgaagagggactgcgtactactttgactactggggccaaggcaccactctcacagtctcctca

SEQ ID NO: 223 - protein, 119 aa, Mus musculus
QVTLKESGPGILKPSQTLSLTCSFSGFSLSTSGMGIGWIRQPSGKGLEWLAHIWWDDDKYYNPSLKSQLTISKDSSRNQVFLKITSVDTADTATYYCARRGTAYYFDYWGQGTTLTVSS

SEQ ID NO: 224 - DNA, 318 bp, Mus musculus
  misc_feature (1)..(318): SC16.104 VL
  CDS (1)..(318)
caaattgttctctcccagtctccagcaatcctgtctgcatctccaggggagaaggtcacaatgacttgcagggccagttcaagtgtaagttacattcactggtaccggcagaagccaggatcctcccccaaaccctggatttatgccacatccaacctggcttctggagtccctgctcgcttcagtggcagtgggtctgggacctcttactctctcacaatcagcagagtggaggctgaagatgctgccacttattactgccagcagtggagcagtaatccacccacgttcggtgctgggaccaagctggagctgaaa

SEQ ID NO: 225 - protein, 106 aa, Mus musculus
QIVLSQSPAILSASPGEKVTMTCRASSSVSYIHWYRQKPGSSPKPWIYATSNLASGVPARFSGSGSGTSYSLTISRVEAEDAATYYCQQWSSNPPTFGAGTKLELK

SEQ ID NO: 226 - DNA, 345 bp, Mus musculus
  misc_feature (1)..(345): SC16.104 VH
  CDS (1)..(345)
caggtgcagctgaaggagtcaggacctgaccttgtgcagccctcacagaccctgtctctcacctgcactgtctctgggttctcattaaccttctatggtgttcactgggttcgccagcctccaggaaagggactggagtgggtgggaacaatgggctgggatgacaaaaaatattataattcagctctaaaatctcgactgagcatcagcagggatacctccaagaaccaggttttcttaaaactgagcagtctgcaaactgaagacacagccatgtactactgtactagaggtgggacggggtttgactactggggccaaggcaccactctcacagtctcctca

SEQ ID NO: 227 - protein, 115 aa, Mus musculus
QVQLKESGPDLVQPSQTLSLTCTVSGFSLTFYGVHWVRQPPGKGLEWVGTMGWDDKKYYNSALKSRLSISRDTSKNQVFLKLSSLQTEDTAMYYCTRGGTGFDYWGQGTTLTVSS

SEQ ID NO: 228 - DNA, 321 bp, Mus musculus
  misc_feature (1)..(321): SC16.105 VL
  CDS (1)..(321)
gacattgtgatgacccagtcgcacaaattcatgtccacatcagtaggagacagggtcagcatcacctgcaaggccagtcaggatgtgggtactgctgtagcctggtatcaacagaaaccagggcaatctcctaaactactgatttactgggcatccatccggcacactggagtccctgatcgcttcacaggcagtggatctgggacagatttcactctcaccattagcaatgtgcagtctgaagacttggcagattatttctgtcagcaatatagcagctatccgctcacgttcggtgctgggaccaagctggagctgaaa

SEQ ID NO: 229 - protein, 107 aa, Mus musculus
DIVMTQSHKFMSTSVGDRVSITCKASQDVGTAVAWYQQKPGQSPKLLIYWASIRHTGVPDRFTGSGSGTDFTLTISNVQSEDLADYFCQQYSSYPLTFGAGTKLELK

SEQ ID NO: 230 - DNA, 363 bp, Mus musculus
  misc_feature (1)..(363): SC16.105 VH
  CDS (1)..(363)
caggtccaactgcagcagcctggggctgagcttgtgaagcctggggcttcagtgaagctgtcctgcaaggcttctggctacaccttcaccagctactggatgcactgggtgaagcagaggcctggacaaggccttgagtggattggagtgattaatcctagcaacggtcgtactaactacaatgagaagttcaagagcaaggccacactgactgtagacaaatcctccagcacagcctacatgcaactcagcagcctgacatctgaggactctgcggtctattactgtgcaagaagaagggaactgggaaccctctatgctatggactactggggtcaaggaacctcagtcaccgtctcctca

SEQ ID NO: 231 - protein, 121 aa, Mus musculus
QVQLQQPGAELVKPGASVKLSCKASGYTFTSYWMHWVKQRPGQGLEWIGVINPSNGRTNYNEKFKSKATLTVDKSSSTAYMQLSSLTSEDSAVYYCARRRELGTLYAMDYWGQGTSVTVSS

SEQ ID NO: 232 - DNA, 321 bp, Mus musculus
  misc_feature (1)..(321): SC16.106 VL
  CDS (1)..(321)
gacatcaagatgacccagtctccatcttccatgtatgcatctctaggagagagagtcactatcacttgcaaggcgagtcaggacattaatagctatttaagctggttccagcagaaaccagggaaatctcctaagaccctgatctatcgtgcaaacagattggtagatggggtcccatcaaggttcagtggcagtggatctgggcaagattattctctcaccatcagcagcctggagtatgaagatatgggaatttattattgtctacagtatgatgagtttccattcacgttcggctcggggacaaagttggaaataaaa

SEQ ID NO: 233 - protein, 107 aa, Mus musculus
DIKMTQSPSSMYASLGERVTITCKASQDINSYLSWFQQKPGKSPKTLIYRANRLVDGVPSRFSGSGSGQDYSLTISSLEYEDMGIYYCLQYDEFPFTFGSGTKLEIK

SEQ ID NO: 234 - DNA, 345 bp, Mus musculus
  misc_feature (1)..(345): SC16.106 VH
  CDS (1)..(345)
caggtgcaactgaagcagtcaggacctggcctggtggcgccctcacagagcctgttcatcacatgcaccgtctcagggttctcattaaccagctatgaaataaactgggttcgccagcctccaggaaagggtctggagtggctgggagtgatatggactggtggaagcacaaattataattcagctctcatatccagactgagcatcagcaaagacaactccaagagcctagttttcttaaaaatgaacagtctgcaaactgatgacacagccatatattactgtgtaagaggtgtttatgctatggactactggggtcaaggaacctcagtcaccgtctcctca

SEQ ID NO: 235 - protein, 115 aa, Mus musculus
QVQLKQSGPGLVAPSQSLFITCTVSGFSLTSYEINWVRQPPGKGLEWLGVIWTGGSTNYNSALISRLSISKDNSKSLVFLKMNSLQTDDTAIYYCVRGVYAMDYWGQGTSVTVSS

SEQ ID NO: 236 - DNA, 321 bp, Mus musculus
  misc_feature (1)..(321): SC16.107 VL
  CDS (1)..(321)
gacattgtgatgacccagtctcacaaattcatgtccacatcagtaggagacagggtcagcatcacctgcaaggccagtcaggatgtgaatactgctgtaggctggtatcaacagaaaccaggacaatctcctaaactactgatttactcggcatcctaccggtacactggagtccctgatcgcttcactggcagtggatctgggacggatttcactttcaccatcagcagtgtgcaggctgaagacctggcagtttattactgtcagcaacattatagtagtccgtacacgttcggaggggggaccaaggtggaaataaaa

SEQ ID NO: 237 - protein, 107 aa, Mus musculus
DIVMTQSHKFMSTSVGDRVSITCKASQDVNTAVGWYQQKPGQSPKLLIYSASYRYTGVPDRFTGSGSGTDFTFTISSVQAEDLAVYYCQQHYSSPYTFGGGTKVEIK

SEQ ID NO: 238 - DNA, 357 bp, Mus musculus
  misc_feature (1)..(357): SC16.107 VH
  CDS (1)..(357)
gaggtccagctgcagcagtctggacctgagctggtaaagcctggggcttcagtgaagatgtcctgcaaggcttctggatacacattcactaactatgttatgcactgggtgaagcagaagcctgggcagggccttgagtggattggatatattaatccttacaatgatggtactaaatacaatgagaagttcaaaggcaaggccacactgacttcagacaaatcctccaccacagcctacatggcgctcagcagcctgacctctgaggactctgcggtctattactgtgcagtagcctactatagtaactgggggtttgcttactggggccaagggactctggtcactgtctctgca

SEQ ID NO: 239 - protein, 119 aa, Mus musculus
EVQLQQSGPELVKPGASVKMSCKASGYTFTNYVMHWVKQKPGQGLEWIGYINPYNDGTKYNEKFKGKATLTSDKSSTTAYMALSSLTSEDSAVYYCAVAYYSNWGFAYWGQGTLVTVSA

SEQ ID NO: 240 - DNA, 321 bp, Mus musculus
  misc_feature (1)..(321): SC16.108 VL
  CDS (1)..(321)
gacatccagatgactcagtctccagcctccctatctgcatctgtgggagaaactgtcaccatcacatgtcgagcaagtgagaatatttacagttatttagcatggtatcagcagaaacagggaaaatctcctcagctcctggtctataatgcaaaaaccttagcagaaggtgtgccatcaaggttcagtggcagtagatcaggctcacagttttctctgaagatcaacagcctgcagcctgaagattttgggagttattactgtcaacatcattatggtactccgtacacgttcggaggggggaccaagctggaaataaaa

SEQ ID NO: 241 - protein, 107 aa, Mus musculus
DIQMTQSPASLSASVGETVTITCRASENIYSYLAWYQQKQGKSPQLLVYNAKTLAEGVPSRFSGSRSGSQFSLKINSLQPEDFGSYYCQHHYGTPYTFGGGTKLEIK

SEQ ID NO: 242 - DNA, 360 bp, Mus musculus
  misc_feature (1)..(360): SC16.108 VH
  CDS (1)..(360)
caggttcagctggaggagtcaggggctgagctggcaagacctggggcttcagtgaagttgtcctgcaaggcttctggctatagctactggatgcagtggataaaacagaggcctggacagggtctggaatggattggggctatttatcctggaaatggtgatactaggtacactcagaagttcaagggcaaggccacattgactgcagataaatcctccagcacagcctacatgcaactcagcagcttggcatctgaggactctgcggtctattactgtgcaagatctccggcctactataggtacggcgagggctactttgactactggggccaaggcaccactctcacagtctcctca

SEQ ID NO: 243 - protein, 120 aa, Mus musculus
QVQLEESGAELARPGASVKLSCKASGYSYWMQWIKQRPGQGLEWIGAIYPGNGDTRYTQKFKGKATLTADKSSSTAYMQLSSLASEDSAVYYCARSPAYYRYGEGYFDYWGQGTTLTVSS

SEQ ID NO: 244 - DNA, 318 bp, Mus musculus
  misc_feature (1)..(318): SC16.109 VL
  CDS (1)..(318)
caaattgttctcacccagtctccagcaatcatgtctgcatctccaggggagaaggtcaccatgacctgcagtgccagctcaagtgtaagttacatgtactggtaccagcagaagccaggatcctcccccagactcctgatttatgacacatccaacctggcttctggagtccctgttcgcttcagtggcagtgggtctgggacctctttctctctcacaatcagccgaatggaggctgaagatactgccacttattactgccaggagtggagtggtaatccgctcacgttcggtgatgggaccaagctggagctgaaa

SEQ ID NO: 245 - protein, 106 aa, Mus musculus
QIVLTQSPAIMSASPGEKVTMTCSASSSVSYMYWYQQKPGSSPRLLIYDTSNLASGVPVRFSGSGSGTSFSLTISRMEAEDTATYYCQEWSGNPLTFGDGTKLELK

SEQ ID NO: 246 - DNA, 354 bp, Mus musculus
  misc_feature (1)..(354): SC16.109 VH
  CDS (1)..(354)
cagatccagttggtgcagtctggacctgagctgaagaagcctggagagacagtcaagatctcctgcaaggcttctgggtataccttcacaaactatggaatgaactgggtgaagcaggctccaggaaagggtttaaagtggatgggctggataaacacctacactggagagccagcatatgctgatgacttcaagggacggtttgccttctctttggaaacctctgccagcgctgcctatttgcagatcaacaacctcaaaaatgaggacacggctacttttttctgtgcaaatatgaggcccacgagggggtttgcttactgggggcaagggactctgggcactgtctctgca

SEQ ID NO: 247 - protein, 118 aa, Mus musculus
QIQLVQSGPELKKPGETVKISCKASGYTFTNYGMNWVKQAPGKGLKWMGWINTYTGEPAYADDFKGRFAFSLETSASAAYLQINNLKNEDTATFFCANMRPTRGFAYWGQGTLGTVSA

SEQ ID NO: 248 - DNA, 321 bp, Mus musculus
  misc_feature (1)..(321): SC16.110 VL
  CDS (1)..(321)
aatattgtgatgacccagactcccaaattcctgcttgtatcagcaggagacagggttaccataacctgcaaggccagtcagagtgtgagtaatgatgtagcttggtaccaacagaagccagggcagtctcctaaactgctgatatactatgcatccaatcgctacactggagtccctgatcgcttcactggcagtggatatgggacggatttcactttcaccatcagcactgtgcaggctgaagacctggcagtttatttctgtcagcaggattatagctctcctccgacgttcggtggaggcaccaagctggaaatcaaa

SEQ ID NO: 249 - protein, 107 aa, Mus musculus
NIVMTQTPKFLLVSAGDRVTITCKASQSVSNDVAWYQQKPGQSPKLLIYYASNRYTGVPDRFTGSGYGTDFTFTISTVQAEDLAVYFCQQDYSSPPTFGGGTKLEIK

SEQ ID NO: 250 - DNA, 354 bp, Mus musculus
  misc_feature (1)..(354): SC16.110 VH
  CDS (1)..(354)
gaggtccagctgcagcagtctggacctgggctagtgaggactggggcttcagtgaagatatcctgcaaggcttctggttactcattcactggttactacatgcactgggtcaagcagagccatggaaagagccttgagtggattggatatattagttgttacaatggtgctactacctacaaccagaacttcaagggcaaggccacatttattgtagacacatcctccagcacagcctacatgcagttcaacagcctgacatctgaggactctgcggtctattactgtgcaagatccgacggggggcatgctatggactactggggtcaaggaacctcagtcaccgtctcctca

SEQ ID NO: 251 - protein, 118 aa, Mus musculus
EVQLQQSGPGLVRTGASVKISCKASGYSFTGYYMHWVKQSHGKSLEWIGYISCYNGATTYNQNFKGKATFIVDTSSSTAYMQFNSLTSEDSAVYYCARSDGGHAMDYWGQGTSVTVSS

SEQ ID NO: 252 - DNA, 321 bp, Mus musculus
  misc_feature (1)..(321): SC16.111 VL
  CDS (1)..(321)
gacatccagatgactcagtctccagcctccctggctgcatctgtgggagaaactgtcaccatcacatgtcgagcaagtgagaacatttactacagtttagcatggtatcagcagaagcaagggaaatctcctcagctcctgatctataatgcaaacagcttggaagatggtgtcccatcgaggttcagtggcagtggatctgggacacagtattctatgaagatcaacagcatgcagcctgaagataccgcaacttatttctgtaagcagacttatgacgttccgctcacgttcggtgctgggaccaagctggagctgaaa

SEQ ID NO: 253 - protein, 107 aa, Mus musculus
DIQMTQSPASLAASVGETVTITCRASENIYYSLAWYQQKQGKSPQLLIYNANSLEDGVPSRFSGSGSGTQYSMKINSMQPEDTATYFCKQTYDVPLTFGAGTKLELK

SEQ ID NO: 254 - DNA, 351 bp, Mus musculus
  misc_feature (1)..(351): SC16.111 VH
  CDS (1)..(351)
gaggttcagctgcagcagtctggacctgagctggagaagcctggcgcttcagtgaagatatcctgcaaggcttctggttactcattcactggctacaacatgaactgggtgaagcagagcaatggaaagagccttgagtggattggaaatattgatccttattatggtggttctagctacaaacagaagttcgagggcaaggccacattgactgtagacaaatcctccagcacagcctacatgcagctcaagagcctgacatctgaggactctgcagtctattactgtgcaagaggtggtagtaacttctttgactactggggccaaggcaccactctcacagtctcctca

SEQ ID NO: 255 - protein, 117 aa, Mus musculus
EVQLQQSGPELEKPGASVKISCKASGYSFTGYNMNWVKQSNGKSLEWIGNIDPYYGGSSYKQKFEGKATLTVDKSSSTAYMQLKSLTSEDSAVYYCARGGSNFFDYWGQGTTLTVSS

SEQ ID NO: 256 - DNA, 336 bp, Mus musculus
  misc_feature (1)..(336): SC16.113 VL
  CDS (1)..(336)
gatgttgtgatgacccagactccactcactttgtcggttaccattggacaaccagcctccatctcttgcaagtcaagtcagagcctcttagatagtgatggaacgacatatttgaattggttgttacagaggccaggccagtctccaaagcgcctaatctatctggtgtctaaactggactctggagtccctgacaggttcactggcagtggatcagggacagatttcacactgaaaatcagcagagtggaggctgaggatttgggagtttattattgctggcaaggtacacattttccgctcacgttcggtgctgggaccaagctggagctgaaa

SEQ ID NO: 257 - protein, 112 aa, Mus musculus
DVVMTQTPLTLSVTIGQPASISCKSSQSLLDSDGTTYLNWLLQRPGQSPKRLIYLVSKLDSGVPDRFTGSGSGTDFTLKISRVEAEDLGVYYCWQGTHFPLTFGAGTKLELK

SEQ ID NO: 258 - DNA, 351 bp, Mus musculus
  misc_feature (1)..(351): SC16.113 VH
  CDS (1)..(351)
gacgtgaagctggtggagtctgggggaggcttagtgaagcctggagggtccctgaaactctcctgtgcagcctctggattcactttcagtagctataccatgtcttgggttcgccagactccggagaagaggctggagtgggtcgcaaccattagtagtggtggtagttacccctactatccagacagtgtgaagggccgattcaccatctccagagacaatgccaagaacaccctgtacctgcaaatgagcagtctgaagtctgaggacacagccatgtattactgtacaagagatgtctatgatggttactcctactggggccaaggcaccactctcacagtctcctca

SEQ ID NO: 259 - protein, 117 aa, Mus musculus
DVKLVESGGGLVKPGGSLKLSCAASGFTFSSYTMSWVRQTPEKRLEWVATISSGGSYPYYPDSVKGRFTISRDNAKNTLYLQMSSLKSEDTAMYYCTRDVYDGYSYWGQGTTLTVSS

SEQ ID NO: 260 - DNA, 318 bp, Mus musculus
  misc_feature (1)..(318): SC16.114 VL
  CDS (1)..(318)
caaattgttctctcccagtctccagcaatcctgtctgcatctccaggggagaaggtcacaatgacttgcagggccagctcaagtgtaagttacatgcactggtaccagcagaagccaggatcctcccccaaaccctggatttatgccacatccaacctggcttctggagtccctgctcgcttcagtggcagtgggtctgggacctcttactctctcacaatcagcagagtggaggctgaagatgctgccacttattactgccagcagtggagtagtaacccatacacgttcggaggggggaccaagctggaaataaaa

SEQ ID NO: 261 - protein, 106 aa, Mus musculus
QIVLSQSPAILSASPGEKVTMTCRASSSVSYMHWYQQKPGSSPKPWIYATSNLASGVPARFSGSGSGTSYSLTISRVEAEDAATYYCQQWSSNPYTFGGGTKLEIK

SEQ ID NO: 262 - DNA, 369 bp, Mus musculus
  misc_feature (1)..(369): SC16.114 VH
  CDS (1)..(369)
gaggttcagctgcagcagtctggggcagaacttgtgaagccaggggcctcagtcaaattgtcctgcacagcttctggcttcaacattaaagacacctatatacactgggtgaaacagaggcctgaacagggcctggagtggattggaaggattgatcctgcgaatggtaatactaaatatgacccgaagttccagggcaaggccactataacaccagacacatcctccaacacagcctacctgcagctcagcagcctgacatctgaggacactgccgtctattactgtgctagaagctggcgaaactacggtagtagtttctggtacttcgatgtctggggcgcagggaccacggtcaccgtctcctca

SEQ ID NO: 263 - protein, 123 aa, Mus musculus
EVQLQQSGAELVKPGASVKLSCTASGFNIKDTYIHWVKQRPEQGLEWIGRIDPANGNTKYDPKFQGKATITPDTSSNTAYLQLSSLTSEDTAVYYCARSWRNYGSSFWYFDVWGAGTTVTVSS

SEQ ID NO: 264 - DNA, 336 bp, Mus musculus; identical to SEQ ID NO: 256
  misc_feature (1)..(336): SC16.115 VL
  CDS (1)..(336)

SEQ ID NO: 265 - protein, 112 aa, Mus musculus; identical to SEQ ID NO: 257

SEQ ID NO: 266 - DNA, 351 bp, Mus musculus; identical to SEQ ID NO: 258
  misc_feature (1)..(351): SC16.115 VH
  CDS (1)..(351)

SEQ ID NO: 267 - protein, 117 aa, Mus musculus; identical to SEQ ID NO: 259

SEQ ID NO: 268 - DNA, 333 bp, Mus musculus
  misc_feature (1)..(333): SC16.116 VL
  CDS (1)..(333)
gacattgtgatgacacagtctccatcctccctgactgtgacagcaggagagaaggtcactatgagctgcacgtccagtcagagtctgttaaccagtggaaatcaaaagaactacttgacctggtaccagcagaaaccagggcagcctcctaaactgttgatctactgggcatccactagggaatctggggtccctgatcgcttcacaggcagtggatctggaacagatttcactctcaccatcagcagtttgcaggctgaagacctggcagtttattactgtcagaatgattatagtctcacgttcggtgctgggaccaagctggagctgaaa

SEQ ID NO: 269 - protein, 111 aa, Mus musculus
DIVMTQSPSSLTVTAGEKVTMSCTSSQSLLTSGNQKNYLTWYQQKPGQPPKLLIYWASTRESGVPDRFTGSGSGTDFTLTISSLQAEDLAVYYCQNDYSLTFGAGTKLELK

SEQ ID NO: 270 - DNA, 354 bp, Mus musculus
  misc_feature (1)..(354): SC16.116 VH
  CDS (1)..(354)
caggtgcagctgaagcagtcaggacctggccgagtgcagccctcacagagcctgtccatcacctgcacagtctctggtttttcattaactagcaatggtgtacactgggttcgccagtctccaggaaagggtctggagtggctgggagtgctatggagtggtggaagcacagactataatgcagctttcatatccagactgagcatcagcaaggacaattacaagagccaagttttctttaaaatgaacagtctgcaagctaatgacacagccatatattactgtgccagaaataataataggtacggagctatggactactggggtcaaggaacctcagtcaccgtctcctca

SEQ ID NO: 271 - protein, 118 aa, Mus musculus
QVQLKQSGPGRVQPSQSLSITCTVSGFSLTSNGVHWVRQSPGKGLEWLGVLWSGGSTDYNAAFISRLSISKDNYKSQVFFKMNSLQANDTAIYYCARNNNRYGAMDYWGQGTSVTVSS

SEQ ID NO: 272 - DNA, 321 bp, Mus musculus
  misc_feature (1)..(321): SC16.117 VL
  CDS (1)..(321)
gacatccagatgaaccagtctccatccagtctgtctgcatcccttggagacacaattaccatcacttgccatgtcagtcagaacattaatgtttggttaagctggtaccagcagaaaccaggaaatattcctaaactattgatccaaaaggcttccaacttgcacacaggcgtcccctcaaggtttagtggcagtggatctggaacaggtttcacattaaccatcagcagcctgcagcctgaagacattgccacttactactgtcaacagggtcaaagttatccattcacgttcggctcggggacaaagttggaaataaaa

SEQ ID NO: 273 - protein, 107 aa, Mus musculus
DIQMNQSPSSLSASLGDTITITCHVSQNINVWLSWYQQKPGNIPKLLIQKASNLHTGVPSRFSGSGSGTGFTLTISSLQPEDIATYYCQQGQSYPFTFGSGTKLEIK

SEQ ID NO: 274 - DNA, 351 bp, Mus musculus
  misc_feature (1)..(351): SC16.117 VH
  CDS (1)..(351)
caggtgcagctgaaggagtcaggacctggcctggtggcgccctcacagagcctgtccatcacttgcactgtctctgggttttcattaaccaactatggtgtacactgggttcgccagcctccaggaaagggtctggagtggctgggagtaatatgggctggtggaatcacaaattataattcggctctcatgtccagactgagcatcagcgaagacaactccaagagccaagttttcttaaaaatgaacagtctgcaaactgatgacacagccatgtactactgtgccagaaatttaggtccctatgctatggactactggggtcaaggaacctcagtcaccgtctcctca

SEQ ID NO: 275 - protein, 117 aa, Mus musculus
QVQLKESGPGLVAPSQSLSITCTVSGFSLTNYGVHWVRQPPGKGLEWLGVIWAGGITNYNSALMSRLSISEDNSKSQVFLKMNSLQTDDTAMYYCARNLGPYAMDYWGQGTSVTVSS

SEQ ID NO: 276 - DNA, 333 bp, Mus musculus
  misc_feature (1)..(333): SC16.118 VL
  CDS (1)..(333)
gacattgtgctgacccaatctccagcttctttggctgtgtctctagggcagagggccaccatctcctgcaaggccagccaaagtgttgattatgatggtgatagttatttgacctggtaccaacagaaaccaggacagccacccaaactcctcatctatgctgcatccaatctagaatctgggatcccagccaggtttagtggcagtgggtctgggacagacttcaccctcaacatccatcctgtggaggaggaggacgctgcaacctattactgtcagcaaagtaatgaggatccgtacacgttcggaggggggaccaagctggaaataaaa

SEQ ID NO: 277 - protein, 111 aa, Mus musculus
DIVLTQSPASLAVSLGQRATISCKASQSVDYDGDSYLTWYQQKPGQPPKLLIYAASNLESGIPARFSGSGSGTDFTLNIHPVEEEDAATYYCQQSNEDPYTFGGGTKLEIK

SEQ ID NO: 278 - DNA, 351 bp, Mus musculus
  misc_feature (1)..(351): SC16.118 VH
  CDS (1)..(351)
gaggtccagctgcagcagtctggacctgacctggtgaagcctggggcttcagtgaagatatcctgcaaggcttctggttactcattcactggctactacatgcactgggtgaagcagagccatggaaagagccttgagtggattggacgtgttaatcctaacaatggtggtactagctacaaccagaagttcaagggcaaggccatattaactgcagacaagtcatccagcacagcctacatggagctccgcagcctgacatctgaggactctgcggtctattactgtgcaagagggagttatgattacgccgagggctggggccaagggactctggtcactgtctctgca

SEQ ID NO: 279 - protein, 117 aa, Mus musculus
EVQLQQSGPDLVKPGASVKISCKASGYSFTGYYMHWVKQSHGKSLEWIGRVNPNNGGTSYNQKFKGKAILTADKSSSTAYMELRSLTSEDSAVYYCARGSYDYAEGWGQGTLVTVSA

SEQ ID NO: 280 - DNA, 339 bp, Mus musculus
  misc_feature (1)..(339): SC16.120 VL
  CDS (1)..(339)
gacattgtgatgtcacagtctccatcctccctagctgtgtcagttggagagaaggttactatgagctgcaagtccagtcagagccttttatatagtagcactcaaaagaactacttggcctggtaccagcagaaaccagggcagtctcctaaactgctgatttactgggcatccactagggaatctggggtccctgatcgcttcacaggcagtggatctgggacagatttcactctcaccatcagcagtgtgaaggctgaagacctggcagtttattactgtcagcaatattatagctatccgtacacgttcggaggggggaccaagctggaaataaaa

SEQ ID NO: 281 - protein, 113 aa, Mus musculus
DIVMSQSPSSLAVSVGEKVTMSCKSSQSLLYSSTQKNYLAWYQQKPGQSPKLLIYWASTRESGVPDRFTGSGSGTDFTLTISSVKAEDLAVYYCQQYYSYPYTFGGGTKLEIK

SEQ ID NO: 282 - DNA, 351 bp, Mus musculus
  misc_feature (1)..(351): SC16.120 VH
  CDS (1)..(351)
gagatccagctgcagcagtctggacctgagctggtgaagcctggggcttcagtgaaggtatcctgcaaggcttctggttatgcattcactagctacaacatgtactgggtgatgcagagccatggaaagagccttgagtggattggatatgttgatccttacaatggtggtactagctacaaccagaagttcaagggcaaggccacattgactgttgacaagtcctccagcacagcctacatgcatctcaacagcctgacatctgaggactctgcagtctattactgtgcaagagaaaactataggtactttgactactggggccaaggcaccactctcacagtctcctca

SEQ ID NO: 283 - protein, 117 aa, Mus musculus
EIQLQQSGPELVKPGASVKVSCKASGYAFTSYNMYWVMQSHGKSLEWIGYVDPYNGGTSYNQKFKGKATLTVDKSSSTAYMHLNSLTSEDSAVYYCARENYRYFDYWGQGTTLTVSS

SEQ ID NO: 284 - DNA, 318 bp, Mus musculus
  misc_feature (1)..(318): SC16.121 VL
  CDS (1)..(318)
caaattgttctcacccagtctccagcaatcatgtctgcatctccaggggagaaggtcaccataacctgcagtgccagctcaagtgtaagttacatgcactggttccagcagaagccaggcacttctcccaaactctggatttatagcacatccaacctggcttctggagtccctgctcgcttcagtggcagtggatctgggacctcttactctctcacaatcagccgaatggaggctgaagatgctgccacttattactgccagcaaaggagtagttacccacccacgttcggaggggggaccaagctggaaataaar

SEQ ID NO: 285 - protein, 106 aa, Mus musculus
QIVLTQSPAIMSASPGEKVTITCSASSSVSYMHWFQQKPGTSPKLWIYSTSNLASGVPARFSGSGSGTSYSLTISRMEAEDAATYYCQQRSSYPPTFGGGTKLEIK

SEQ ID NO: 286 - DNA, 372 bp, Mus musculus
  misc_feature (1)..(372): SC16.121 VH
  CDS (1)..(372)
gaggtgcagcttgttgagtctggtggaggattggtgcagcctaaagggtcattgaaactctcatgtgcagcctctggattcaccttcaatacctacgccatgaactgggtccgccaggctccaggaaagggtttggaatgggttgctcgcataagaattaaaagtaataattatgcaacatattatgccgattcagtaaaagacaggttcaccatctccagagatgattcacaaaacatgctctatctgcaaatgaacaacttgaaaactgaggacacagccgtgtattactgtgtgagacaaggctatagttacgactggggaccctggtttgcttactggggccaagggactctggtcactgtctctgca

SEQ ID NO: 287 - protein, 124 aa, Mus musculus
EVQLVESGGGLVQPKGSLKLSCAASGFTFNTYAMNWVRQAPGKGLEWVARIRIKSNNYATYYADSVKDRFTISRDDSQNMLYLQMNNLKTEDTAVYYCVRQGYSYDWGPWFAYWGQGTLVTVSA

SEQ ID NO: 288 - DNA, 321 bp, Mus musculus
  misc_feature (1)..(321): SC16.122 VL
  CDS (1)..(321)
gacattgtgatgacccagtctcaaaaattcatgtccacatcagtaggagacagggtcagcgtcacctgcaaggccagtcagaatgtgggtactaatgtagcctggtatcaacagaaaccagggcaatctcctaaagtactgatttactcggcatcctaccggtacagtggagtccctgatcgcttcacaggcagtggatctgggacagatttcactctcaccatcagcaatgtgcagtctgaagacttggcagagtttttctgtcagcaatataacagctatcctctgacgttcggtggaggcaccaagctggaaatcaaa

SEQ ID NO: 289 - protein, 107 aa, Mus musculus
DIVMTQSQKFMSTSVGDRVSVTCKASQNVGTNVAWYQQKPGQSPKVLIYSASYRYSGVPDRFTGSGSGTDFTLTISNVQSEDLAEFFCQQYNSYPLTFGGGTKLEIK

SEQ ID NO: 290 - DNA, 354 bp, Mus musculus
  misc_feature (1)..(354): SC16.122 VH
  CDS (1)..(354)
gaagtgcagctggtggagtctgggggaggcttagtgaagcctggagggtccctgaaactctcctgtgcagcctctggattcactttcagtgactattacatgttttgggttcgccagactccggaaaagaggctggagtgggtcgcaaccattagtgatggtggtagttacacctactttccagacagtgtgaaggggcgattcaccatctccagagacaatgcccagaacaacctgtacctgcaaatgagcagtctgaagtctgaggacacagccatgtattactgtgcaagagccgggaccctctatgctatggactactggggtcaaggaacctcagtcaccgtctcctca

SEQ ID NO: 291 - protein, 118 aa, Mus musculus
EVQLVESGGGLVKPGGSLKLSCAASGFTFSDYYMFWVRQTPEKRLEWVATISDGGSYTYFPDSVKGRFTISRDNAQNNLYLQMSSLKSEDTAMYYCARAGTLYAMDYWGQGTSVTVSS

SEQ ID NO: 292 - DNA, 324 bp, Mus musculus
  misc_feature (1)..(324): SC16.123 VL
  CDS (1)..(324)
caaattgttctcacccagtctccagcaatcatgtctgcatctctaggggaacgggtcaccatgacctgcactgccagctcaagtgtaagttccagttacttgcactggtaccagcagaagccaggatcctcccccaaactctggatttatagcacatccaacctggcttctggagtcccagctcgcttcagtggcagtgggtctgggacctcttactctctcacaatcagcagcatggagactgaagatgctgccacttattactgccaccagtatcatcgttcccccttcacgttcggctcggggacaaagttggaaataaaa

SEQ ID NO: 293 - protein, 108 aa, Mus musculus
QIVLTQSPAIMSASLGERVTMTCTASSSVSSSYLHWYQQKPGSSPKLWIYSTSNLASGVPARFSGSGSGTSYSLTISSMETEDAATYYCHQYHRSPFTFGSGTKLEIK

SEQ ID NO: 294 - DNA, 366 bp, Mus musculus
  misc_feature (1)..(366): SC16.123 VH
  CDS (1)..(366)
caggttgctctgaaagagtctggccctgggatattgcagccctcccagaccctcagtctgacttgttctttctctgggttttcactgagcacttctggtatgggtgtaggctggattcgtcagccatcagggaagggtctggagtggctggcacacatttggtgggatgatgtcaagcgctataacccagccctgaagagccgactgactatctccaaggatacctccagcagccaggtattcctcaagatcgccagtgtggacactgcagatactgccacatactactgtgctcgaatggaggactacggtagtagctcctactttgacttctggggccacggcaccactctcacagtctcctca

SEQ ID NO: 295 - protein, 122 aa, Mus musculus
QVALKESGPGILQPSQTLSLTCSFSGFSLSTSGMGVGWIRQPSGKGLEWLAHIWWDDVKRYNPALKSRLTISKDTSSSQVFLKIASVDTADTATYYCARMEDYGSSSYFDFWGHGTTLTVSS

SEQ ID NO: 296 - DNA, 321 bp, Mus musculus
  misc_feature (1)..(321): SC16.124 VL
  CDS (1)..(321)
gacattcagatgacccagtctcctgcctcccagtctgcatctctgggagaaagtgtcaccatcacatgcctggcaagtcagaccattggtacatggttagcatggtatcagcagaaaccagggaaatctcctcagctcctgatttctgctgcaaccagcttggcagatggggtcccatcaaggttcagtggtagtggatctggcacaaaattttctttcaagatcagcagcctacaggctgaagattttgtaagttattactgtcaacaactttacagtactccgtggacgttcggtggaggcaccaagctggaaatcaaa

SEQ ID NO: 297 - protein, 107 aa, Mus musculus
DIQMTQSPASQSASLGESVTITCLASQTIGTWLAWYQQKPGKSPQLLISAATSLADGVPSRFSGSGSGTKFSFKISSLQAEDFVSYYCQQLYSTPWTFGGGTKLEIK

SEQ ID NO: 298 - DNA, 369 bp, Mus musculus
  misc_feature (1)..(369): SC16.124 VH
  CDS (1)..(369)
gaggtccagctgcagcagtctggacctgagctggtaaagcctggggcttcagtgaagatgtcctgcaaggcttctggatacacattcactagctatgttatgcactgggtgaagcagaagcctgggcagggccttgagtggattggatatattaatccttacaatgatggtactaagtacaatgagaagttcaaaggcaaggccacactgacttcagacaaatcctccagcacagcctacatggagctcagcagcctgacctctgaggactctgcggtctattactgtgcaagaggggctctctactatggtaactacctcgggtacttcgatgtctggggcgcagggaccacggtcaccgtctcctca

SEQ ID NO: 299 - protein, 123 aa, Mus musculus
EVQLQQSGPELVKPGASVKMSCKASGYTFTSYVMHWVKQKPGQGLEWIGYINPYNDGTKYNEKFKGKATLTSDKSSSTAYMELSSLTSEDSAVYYCARGALYYGNYLGYFDVWGAGTTVTVSS

SEQ ID NO: 300 - DNA, 321 bp, Mus musculus
  misc_feature (1)..(321): SC16.125 VL
  CDS (1)..(321)
gacatccagatgaaccagtctccatccagtctgtctgcatcccttggagacacaattaccatcacttgccatgccagtcagaacattaatgtttggttaagctggtaccagcagaaaccaggaaatattcctaaactattgatctataaggcttccatcttacacacaggcgtcccatcaaggtttagtggcagtggatctggaacaggtttcacattaaccatcagcagcctgcagcctgaagacattgccacttactcctgtcaacagggtcaaagttatccgtacacgttcggaggggggaccaagctggaaataaaa

SEQ ID NO: 301 - protein, 107 aa, Mus musculus
DIQMNQSPSSLSASLGDTITITCHASQNINVWLSWYQQKPGNIPKLLIYKASILHTGVPSRFSGSGSGTGFTLTISSLQPEDIATYSCQQGQSYPYTFGGGTKLEIK

SEQ ID NO: 302 - DNA, 354 bp, Mus musculus
  misc_feature (1)..(354): SC16.125 VH
  CDS (1)..(354)
gatgtgcagcttcaggagtcaggacctgacctggtgaaaccttctcagtcactttcactcacctgcactgtcactggctactccatcaccagtggttatagctggcactggatccggcagtttccaggaaacaaactggaatggatgggctacatacactacagtggtagcactaactacaacccatctctcaaaagtcgaatctctatcactcgagacacatccaagaaccagttcttcctgcagttcaaatctgtgactactgaagactcagccacatattactgtgccctagaggggaattacgacgggtttgcttactggggccaagggactctggtcactgtctcttcn

SEQ ID NO: 303 - protein, 118 aa, Mus musculus
  misc_feature (118)..(118): The 'Xaa' at location 118 stands for Ser.
DVQLQESGPDLVKPSQSLSLTCTVTGYSITSGYSWHWIRQFPGNKLEWMGYIHYSGSTNYNPSLKSRISITRDTSKNQFFLQFKSVTTEDSATYYCALEGNYDGFAYWGQGTLVTVSX

SEQ ID NO: 304 - DNA, 321 bp, Mus musculus
  misc_feature (1)..(321): SC16.126 VL
  CDS (1)..(321)
gacatccagatgaaccagtctccatccagtctgtctgcatcccttggagacacaattaccatcacttgccatgccagtcagaacataaatgtttggttaagctggtaccagcagaaaccaggaaatattcctaaactattgatctataaggcttccaacttgcacacaggcgtcccatcaaggtttagtggcagtggatctggaacaggtttcacattaaccatcagcagcctgcagcctgaagacattgccacttactactgtcaacagggtcaaagttatccattcacgttcggctcggggacaaagttggaaataaaa

SEQ ID NO: 305 - protein, 107 aa, Mus musculus
DIQMNQSPSSLSASLGDTITITCHASQNINVWLSWYQQKPGNIPKLLIYKASNLHTGVPSRFSGSGSGTGFTLTISSLQPEDIATYYCQQGQSYPFTFGSGTKLEIK

SEQ ID NO: 306 - DNA, 348 bp, Mus musculus
  misc_feature (1)..(348): SC16.126 VH
  CDS (1)..(348)
caggtgcagatgaaggagtcaggacctggcctggtggcgccctcacagagcctgtccatcacttgcactgtctctgggtcttcattaaccaactatggtgtacactgggttcgccagcctccaggaaagggtctagagtggctgggagtaatatgggctggtggaagcacaaattataattcggctctcatgtccagactgagtatcagcaaagacaactccaagagccaagttttcttaaaaatgaacagtctgcaaactgatgacacagccatgtactactgtgccagagactgggagggctggtttgcttactggggccaagggactctggtcactgtctctgca

SEQ ID NO: 307 - protein, 116 aa, Mus musculus
QVQMKESGPGLVAPSQSLSITCTVSGSSLTNYGVHWVRQPPGKGLEWLGVIWAGGSTNYNSALMSRLSISKDNSKSQVFLKMNSLQTDDTAMYYCARDWEGWFAYWGQGTLVTVSA

SEQ ID NO: 308 - DNA, 321 bp, Mus musculus
  misc_feature (1)..(321): SC16.129 VL
  CDS (1)..(321)
gacattcagatgacccagtctcctgcctcccagtctgcatctctgggagaaagtgtcaccatcacatgcctggcaagtcagaccattggtacatggttagcatggtatcagcagaaaccagggaaatctcctcagctcctgatttatgctgcaaccagcttggcagatggggtcccatcaaggttcagtggtagtggatctggcacaaaattttctttcaagatcagcagcctacaggctgaagattttgtaagttattactgtcaacaactttacagtactccgtacacgttcggaggggggaccaagctggaaataaaa

SEQ ID NO: 309 - protein, 107 aa, Mus musculus
DIQMTQSPASQSASLGESVTITCLASQTIGTWLAWYQQKPGKSPQLLIYAATSLADGVPSRFSGSGSGTKFSFKISSLQAEDFVSYYCQQLYSTPYTFGGGTKLEIK

SEQ ID NO: 310 - DNA, 348 bp, Mus musculus
  misc_feature (1)..(348): SC16.129 VH
  CDS (1)..(348)
caggtgcagctaaaggagtcaggacctggcctggtggcgccctcacagagcctgtccatcacatgcactgtctcagggttctcattaaccgactatggtgtaagctggattcgccagcctccaggaaagggtctggagtggctgggagtaatatggggtggtggaagcacatactataattcagctctcaaatccagactgagcatcagcaaggacaactccaagagccaagttttcttagaactgaacagtctgcaaactgatgacacagccatttactactgtgccaaacattatggtcactacgctgcttactggggccaagggactctggtcactgtctctgca

SEQ ID NO: 311 - protein, 116 aa, Mus musculus
QVQLKESGPGLVAPSQSLSITCTVSGFSLTDYGVSWIRQPPGKGLEWLGVIWGGGSTYYNSALKSRLSISKDNSKSQVFLELNSLQTDDTAIYYCAKHYGHYAAYWGQGTLVTVSA

SEQ ID NO: 312 - DNA, 321 bp, Mus musculus
  misc_feature (1)..(321): SC16.130 VL
  CDS (1)..(321)
gacatccagttgactcagtctccagcctccctatctgcatctgtgggagaaactgtcaccatcacatgtcgagcaagtgggagtattcacaattatttagcatggtatcagcagaaacagggaaagtctcctcagctcctggtctataatgcaaaaaccttagtagatggtgtgccatcaaggttcagtggcagtggatcaggaacacaatattctctcaagatcaacagcctgcagcctgaagattttgggtattattactgtcaacatttttggactactccgtggacattcggtggaggcaccaagctggaaatcaaa

SEQ ID NO: 313 - protein, 107 aa, Mus musculus
DIQLTQSPASLSASVGETVTITCRASGSIHNYLAWYQQKQGKSPQLLVYNAKTLVDGVPSRFSGSGSGTQYSLKINSLQPEDFGYYYCQHFWTTPWTFGGGTKLEIK

SEQ ID NO: 314 - DNA, 360 bp, Mus musculus
  misc_feature (1)..(360): SC16.130 VH
  CDS (1)..(360)
gaggtccagctgcagcagtctggacctgagctggtaaagcctggggcttcagtgaagatgtcctgcaaggcttctggatacacattcactagctatgttatgcactgggtgaagcagaagcctgggcagggccttgagtggattggatatattaatccttacaatgatggtactgagtacaatgagaagttcaaaggcaaggccacactgacttcagacaaatcctccagcacagcctacatggagctcagcagcctgacctctgaggactctgcggtctattactgtgcaagaggggtctatgatggttactcttactttgactactggggccaaggcaccactctcacagtctcctca

SEQ ID NO: 315 - protein, 120 aa, Mus musculus
EVQLQQSGPELVKPGASVKMSCKASGYTFTSYVMHWVKQKPGQGLEWIGYINPYNDGTEYNEKFKGKATLTSDKSSSTAYMELSSLTSEDSAVYYCARGVYDGYSYFDYWGQGTTLTVSS

SEQ ID NO: 316 - DNA, 321 bp, Mus musculus; identical to SEQ ID NO: 272
  misc_feature (1)..(321): SC16.131 VL
  CDS (1)..(321)

SEQ ID NO: 317 - protein, 107 aa, Mus musculus; identical to SEQ ID NO: 273

SEQ ID NO: 318 - DNA, 351 bp, Mus musculus; identical to SEQ ID NO: 274
  misc_feature (1)..(351): SC16.131 VH
  CDS (1)..(351)

SEQ ID NO: 319 - protein, 117 aa, Mus musculus; identical to SEQ ID NO: 275

SEQ ID NO: 320 - DNA, 321 bp, Mus musculus
  misc_feature (1)..(321): SC16.132 VL
  CDS (1)..(321)
gacattcagatgacccagtctcctgcctcccagtctgcatctctgggagaaagtgtcaccatcacatgcctggcaagtcagaccattggtacatggttagcatggtatcagcagaaaccagggaaatctcctcagctcctgatttatgctgcaaccagcttggcagatggggtcccatcaaggttcagtggtagtggatctggcacaaaattttctttcaagatcagcagcctacaggctgaagattttgtaagttattactgtcaacaactttacagtactccgtggacgttcggtggaggcaccaagctggagatcaaa

SEQ ID NO: 321 - protein, 107 aa, Mus musculus
DIQMTQSPASQSASLGESVTITCLASQTIGTWLAWYQQKPGKSPQLLIYAATSLADGVPSRFSGSGSGTKFSFKISSLQAEDFVSYYCQQLYSTPWTFGGGTKLEIK

SEQ ID NO: 322 - DNA, 348 bp, Mus musculus
  misc_feature (1)..(348): SC16.132 VH
  CDS (1)..(348)
caggtgcagctgaaggagtcaggacctggcctggtggcgccctcacagagcctgtccatcacatgcactgtctcagggttctcattaaccgactatggtgtaagctggattcgccagcctccaggaaagggtctggagtggctgggagtagtatggggtggtggaagcacatactataattccgctctcaaatccagactgagcatcaccaaggacaactccaagagccaagttttcttaaaaatgaacagtctgcaaactgatgacacagccatgtactactgtgccaaacagaggggtcagtacggggcttactggggccaagggactctggtcactgtctctgca

SEQ ID NO: 323 - protein, 116 aa, Mus musculus
QVQLKESGPGLVAPSQSLSITCTVSGFSLTDYGVSWIRQPPGKGLEWLGVVWGGGSTYYNSALKSRLSITKDNSKSQVFLKMNSLQTDDTAMYYCAKQRGQYGAYWGQGTLVTVSA

SEQ ID NO: 324 - DNA, 321 bp, Mus musculus
  misc_feature (1)..(321): SC16.133 VL
  CDS (1)..(321)
agtattgtgatgacccagactcccaaattcctgcttgtttcagcaggagacagggttaccataacctgcaaggccagtcagagtgtgagtaatgatgtagcttggtaccaacagaagccagggcagtctcctaaactgctgatatactgtgcatccaatcgctacactggagtccctgatcgcttcactggcagtggatatgggacggatttcactttcaccatcagcactgtgcaggctgaagacctggcagtttatttctgtcagcaggattatagctctccgctcacgttcggtgctgggaccaagctggagctgaaa

SEQ ID NO: 325 - protein, 107 aa, Mus musculus
SIVMTQTPKFLLVSAGDRVTITCKASQSVSNDVAWYQQKPGQSPKLLIYCASNRYTGVPDRFTGSGYGTDFTFTISTVQAEDLAVYFCQQDYSSPLTFGAGTKLELK

SEQ ID NO: 326 - DNA, 357 bp, Mus musculus
  misc_feature (1)..(357): SC16.133 VH
  CDS (1)..(357)
caggtgcagctgaaggagtcaggacctggcctggtggcgccctcacagagcctgtccatcacctgcacagtctctggtttctcattaaccaactatgctgtacactgggttcgccagtctccaggaaagggtctggagtggctgggagtgatatggagtgatggaagcacagactataatgcagctttcatatctagactgagcatcagcaaggacaactccaagagccaagttttctttaagatgaacagtctgcaagctgatgacacagccatgtactactgtgcccgaaagaaaggaggatggtttccctggtttgcttactggggccaagggactctggtcactgtctctgca

SEQ ID NO: 327 - protein, 119 aa, Mus musculus
QVQLKESGPGLVAPSQSLSITCTVSGFSLTNYAVHWVRQSPGKGLEWLGVIWSDGSTDYNAAFISRLSISKDNSKSQVFFKMNSLQADDTAMYYCARKKGGWFPWFAYWGQGTLVTVSA

SEQ ID NO: 328 - DNA, 333 bp, Mus musculus
  misc_feature (1)..(333): SC16.134 VL
  CDS (1)..(333)
gacattgtgctgacccaatctccagcttctttggctgtgtctctagggcagagggccaccatctcctgcaaggccagccaaagtgttgatcatgctggtgatagttatatgaactggtaccaacagaaaccaggacagccacccaaactcctcatctatgctgcatccaatctagaatctgggatcccagccaggtttagtggcagtgggtctgggacagacttcaccctcaacatccatcctgtggaggaggaggatgctgcaacctattactgtcagcaaagtaatgaggatccgtacacgttcggaggggggaccaagctggaaatcaaa

SEQ ID NO: 329 - protein, 111 aa, Mus musculus
DIVLTQSPASLAVSLGQRATISCKASQSVDHAGDSYMNWYQQKPGQPPKLLIYAASNLESGIPARFSGSGSGTDFTLNIHPVEEEDAATYYCQQSNEDPYTFGGGTKLEIK

SEQ ID NO: 330 - DNA, 351 bp, Mus musculus
  misc_feature (1)..(351): SC16.134 VH
  CDS (1)..(351)
gaggtccagctgcagcagtctggacctgacctggtgaagcctggggcttcagtgaagatatcctgcaaggcttctggttactcattcactggctactacatgcactgggtgaagcagagccatggaaagaggcttgagtggattggacgtgttaatcctaacaatggtggtactaactacaaccagaaattcaagggcaaggccatattaactgtagacaagtcatccagcacagcctacatggagctccgcagcctgacatctgaggactctgcggtctattactgtgcaagagggagttatgataacgccgagggctggggccaagggactctggtcactgtctctgca

SEQ ID NO: 331 - protein, 117 aa, Mus musculus
EVQLQQSGPDLVKPGASVKISCKASGYSFTGYYMHWVKQSHGKRLEWIGRVNPNNGGTNYNQKFKGKAILTVDKSSSTAYMELRSLTSEDSAVYYCARGSYDNAEGWGQGTLVTVSA

SEQ ID NO: 332 - DNA, 321 bp, Mus musculus
  misc_feature (1)..(321): SC16.135 VL
  CDS (1)..(321)
gacatcaagatgacccagtctccatcttccatgtatgcatctctaggagagagagtcactatcacttgcaaggcgagtcaggacattaataggtatttaagctggttccagcagaaaccagggaaatctcctaagaccctgatctatcgtgcaaacagattggtagatggggtcccatcaaggttcagtggcagtggatctgggcaagattattctctcaccatcagcagcctggagtatgaagatatgggaatttattattgtctacagtatgatgagtttccattcacgttcggctcggggacaaagttggaaataaaa

SEQ ID NO: 333 - protein, 107 aa, Mus musculus
DIKMTQSPSSMYASLGERVTITCKASQDINRYLSWFQQKPGKSPKTLIYRANRLVDGVPSRFSGSGSGQDYSLTISSLEYEDMGIYYCLQYDEFPFTFGSGTKLEIK

SEQ ID NO: 334 - DNA, 363 bp, Mus musculus
  misc_feature (1)..(363): SC16.135 VH
  CDS (1)..(363)
caggtccagttgcagcagtctggagctgagctggtaaggcctgggacttcagtgaaggtgtcctgcaaggcttctggatacgccttcactaattacttgatagagtgggtaaagcagaggcctggacagggccttgagtggattggggtgattaatcctggaagtggtggtactaactccaatgagaagttcaaggccaaggcaacactgactgcagacaaatcctccagcactgcctacatgcagctcagcagcctgacatctgctgactctgcggtctatttctgtgcaagatcggactatgattacgccttctatgctatggactactggggtcaaggaacctcagtcaccgtctcctca

SEQ ID NO: 335 - protein, 121 aa, Mus musculus
QVQLQQSGAELVRPGTSVKVSCKASGYAFTNYLIEWVKQRPGQGLEWIGVINPGSGGTNSNEKFKAKATLTADKSSSTAYMQLSSLTSADSAVYFCARSDYDYAFYAMDYWGQGTSVTVSS

SEQ ID NO: 336 - DNA, 321 bp, Mus musculus
  misc_feature (1)..(321): SC16.136 VL
  CDS (1)..(321)
gacatccagatgactcagtctccagcctccctatctgcatctgtgggagaaactgtcaccatcacatgtcgagcaagtgggaatattcacaattatttagcatggtatcagcagaaacagggaaaatctcctcacctcctggtctataatgcaaaaaccttagcagatggtgtgccatcaaggttcagtggcagtggatcaggaacacaatattctctcaagatcaacagcctgcagcctgaagattttgggagttattactgtcaacatttttggagtactccgtggacgttcggtggaggcaccaagctggaaatcaaa

SEQ ID NO: 337 - protein, 107 aa, Mus musculus
DIQMTQSPASLSASVGETVTITCRASGNIHNYLAWYQQKQGKSPHLLVYNAKTLADGVPSRFSGSGSGTQYSLKINSLQPEDFGSYYCQHFWSTPWTFGGGTKLEIK

SEQ ID NO: 338 - DNA, 366 bp, Mus musculus
  misc_feature (1)..(366): SC16.136 VH
  CDS (1)..(366)
gaggtccagctgcagcagtctggacctgagctggtaaagcctggggcttcagtgaagatgtcctgcaaggcttctggatacacattcactagctatgttatgcactgggtgaagcagaagcctgggcagggccttgagtggattggatatattaatccttacaatgatggtactaagtacaatgagaagttcaaaggcaaggccacactgacttcagacaaatcctccagcacagcctacatggagctcagcagcctgacctctgaggactctgcggtctattactgtgcaagagacaggtcgggctacgaagattactatggtatggactactggggtcaaggaacctcagtcaccgtctcctca

SEQ ID NO: 339 - protein, 122 aa, Mus musculus
EVQLQQSGPELVKPGASVKMSCKASGYTFTSYVMHWVKQKPGQGLEWIGYINPYNDGTKYNEKFKGKATLTSDKSSSTAYMELSSLTSEDSAVYYCARDRSGYEDYYGMDYWGQGTSVTVSS

SEQ ID NO: 340 - DNA, 318 bp, Mus musculus
  misc_feature (1)..(318): SC16.137 VL
  CDS (1)..(318)
caaattgttctcacccagtctccagcaatcatgtctgcatctctaggggaggagatcaccctaacctgcagtgccagctcgagtgtaagttacatgcactggtaccagcagaagtcaggcacttctcccaaactcttgatttatagcacatccaacctggcttctggagtcccttctcgcttcagtggcagtgggtctgggaccttttattctctcacaatcagcagtgtggaggctgaagatgctgccgattattactgccatcagtggagtagttatcacacgttcggaggggggaccaagctggaaataaaacgg

SEQ ID NO: 341 - protein, 106 aa, Mus musculus
QIVLTQSPAIMSASLGEEITLTCSASSSVSYMHWYQQKSGTSPKLLIYSTSNLASGVPSRFSGSGSGTFYSLTISSVEAEDAADYYCHQWSSYHTFGGGTKLEIKR

SEQ ID NO: 342 - DNA, 351 bp, Mus musculus
  misc_feature (1)..(351): SC16.137 VH
  CDS (1)..(351)
gaggtgcagctggtggagtctgggggagacttagtgaagcctggagggtccctgaaactctcctgtgcagcctctggattcactttcagtagctatggcatgtcttgggttcgccagactccagacaagaggctggagtgggtcgcaaccattagtagtggtggtagttacacctactatccagacagtgtgaaggggcgattcaccatctccagagacaatgccaagaacaccctgtacctgcaaatgagcagtctgaagtctgaggacacagccatgtattactgtgcaagacgaagagccgatgctatggactactggggtcaaggaacctcagtcaccgtctcctca

SEQ ID NO: 343 - protein, 117 aa, Mus musculus
EVQLVESGGDLVKPGGSLKLSCAASGFTFSSYGMSWVRQTPDKRLEWVATISSGGSYTYYPDSVKGRFTISRDNAKNTLYLQMSSLKSEDTAMYYCARRRADAMDYWGQGTSVTVSS

SEQ ID NO: 344 - DNA, 321 bp, Mus musculus
  misc_feature (1)..(321): SC16.138 VL
  CDS (1)..(321)
gacattcagatgacccagtctcctgcctcccagtctgcatctctgggagaaagtgtcaccatcacatgcctggcaagtcagaccattggtacatggttagcatggtatcagcagaaaccagggaaatctcctcagctcctgatttattctgcaaccagcttggcagatggggtcccatcaaggttcagtggtagtggatctggcacaaaattttctttcaagatcagcagcctacaggctgaagattttgtaagttattactgtcaacaactttacagtactccgtggacgttcggtggaggcaccaagctggaaatcaaa

SEQ ID NO: 345 - protein, 107 aa, Mus musculus
DIQMTQSPASQSASLGESVTITCLASQTIGTWLAWYQQKPGKSPQLLIYSATSLADGVPSRFSGSGSGTKFSFKISSLQAEDFVSYYCQQLYSTPWTFGGGTKLEIK

SEQ ID NO: 346 - DNA, 348 bp, Mus musculus
  misc_feature (1)..(348): SC16.138 VH
  CDS (1)..(348)
caggtgcagctgaaggagtcaggacctggcctggtggcgccctcacagagcctgtccatcacatgcactgtctcagggttctcattaaccgactatggtgtaagctggattcgccagcctccaggaaagggtctggagtggctgggagtagtatggggtggtggaagcacatactataattccgctctcaaatccagactgagcatcagcaaggacaactccaagagccaagttttcttaaaaatgaacagtctgcaaactgatgacacagccatgtactactgtgccaaacagaggggtcagtacggggcttactggggccaagggactctggtcactgtctctgca

SEQ ID NO: 347 - protein, 116 aa, Mus musculus
QVQLKESGPGLVAPSQSLSITCTVSGFSLTDYGVSWIRQPPGKGLEWLGVVWGGGSTYYNSALKSRLSISKDNSKSQVFLKMNSLQTDDTAMYYCAKQRGQYGAYWGQGTLVTVSA

SEQ ID NO: 348 - DNA, 321 bp, Mus musculus
  misc_feature (1)..(321): SC16.139 VL
  CDS (1)..(321)
gacattgtgatgacccagtctcacaaattcatgtccacatcagtaggagacagggtcagcatcacctgcaaggccagtcaggatgtgaatactgctgtaggctggtatcaacagaaaccaggacaatctcctaaactactgatttactcggcatcctaccggtacactggagtccctgatcgcttcactggcagtggatctgggacggatttcactttcaccatcagcagtgtgcaggctgaagacctggcagtttattactgtcagcaacattatagtagtccgtacacgttcggaggggggaccaagctggaaattaaa

SEQ ID NO: 349 - protein, 107 aa, Mus musculus
DIVMTQSHKFMSTSVGDRVSITCKASQDVNTAVGWYQQKPGQSPKLLIYSASYRYTGVPDRFTGSGSGTDFTFTISSVQAEDLAVYYCQQHYSSPYTFGGGTKLEIK

SEQ ID NO: 350 - DNA, 357 bp, Mus musculus; identical to SEQ ID NO: 238
  misc_feature (1)..(357): SC16.139 VH
  CDS (1)..(357)

SEQ ID NO: 351 - protein, 119 aa, Mus musculus; identical to SEQ ID NO: 239

SEQ ID NO: 352 - DNA, 333 bp, Mus musculus
  misc_feature (1)..(333): SC16.140 VL
  CDS (1)..(333)
gacattgtgctgacacagtctcttgcttccttagctgtatctctggggcagagggccaccatctcatgcagggccagcaaaagtgtcagtacatctggctatagttatatgcactggtaccaacagaaaccaggacagccacccaaactcctcatttatcttgcatccaacctagaatctggggtccctgccaggttcagtggcagtgggtctgggacagacttcaccctcaacatccatcctgtggaagacgaagatgctgcaacctattactgtcagcacagtagggagcttccgttcacgttcggaggggggaccaagctggaaataaag

SEQ ID NO: 353 - protein, 111 aa, Mus musculus
DIVLTQSLASLAVSLGQRATISCRASKSVSTSGYSYMHWYQQKPGQPPKLLIYLASNLESGVPARFSGSGSGTDFTLNIHPVEDEDAATYYCQHSRELPFTFGGGTKLEIK

SEQ ID NO: 354 - DNA, 348 bp, Mus musculus
  misc_feature (1)..(348): SC16.140 VH
  CDS (1)..(348)
caggtccaactgcagcagtctgggcctgagctggtgaggcctggggcttcagtgaagatgtcctgcaaggcttcaggctataccttcaccagctactggatgcactgggtgaaacagaggcctggacaaggccttgagtggattggcatgattgatccttccaatagtgaaactaggttaaatcagaagttcaaggacaaggccacattgaatgtagacaaatcctccaacacagcctacatgcagctcagcagcctgacatctgaggactctgcagtctattactgtgcagtaatggactactactttgactactggggccaaggcaccactctcacagtctcctca

SEQ ID NO: 355 - protein, 116 aa, Mus musculus
QVQLQQSGPELVRPGASVKMSCKASGYTFTSYWMHWVKQRPGQGLEWIGMIDPSNSETRLNQKFKDKATLNVDKSSNTAYMQLSSLTSEDSAVYYCAVMDYYFDYWGQGTTLTVSS

SEQ ID NO: 356 - DNA, 321 bp, Mus musculus; identical to SEQ ID NO: 232
  misc_feature (1)..(321): SC16.141 VL
  CDS (1)..(321)

SEQ ID NO: 357 - protein, 107 aa, Mus musculus; identical to SEQ ID NO: 233

SEQ ID NO: 358 - DNA, 345 bp, Mus musculus; identical to SEQ ID NO: 234
  misc_feature (1)..(345): SC16.141 VH
  CDS (1)..(345)

SEQ ID NO: 359 - protein, 115 aa, Mus musculus; identical to SEQ ID NO: 235

SEQ ID NO: 360 - DNA, 321 bp, Mus musculus
  misc_feature (1)..(321): SC16.142 VL
  CDS (1)..(321)
gacatcaagatgacccagtctccatcttccatgtatgcatctctaggagagagagtcactatcacttgcaaggcgagtcaggacattaataattatttaagctggttccagcagaaaccagggaaatctcctaagaccctgatctatcgtgcaaacagattggtagatggggtcccatcaaggttcagtggcagtggatctgggcaagattattctctcaccatcagcagcctggagtatgaagatatgggaatttattattgtctacagtatgatgagtttccgtacacgttcggaggggggaccaagctggaaataaaa

SEQ ID NO: 361 - protein, 107 aa, Mus musculus
DIKMTQSPSSMYASLGERVTITCKASQDINNYLSWFQQKPGKSPKTLIYRANRLVDGVPSRFSGSGSGQDYSLTISSLEYEDMGIYYCLQYDEFPYTFGGGTKLEIK

SEQ ID NO: 362 - DNA, 345 bp, Mus musculus
  misc_feature (1)..(345): SC16.142 VH
  CDS (1)..(345)
gaggtccagcttcagcagtcaggacctgagctggtgaaacctggggcctcagtgaagatatcctgcaaggcttctggatacacattcactgactacaacatgcactgggtgaagcagagccatggaaagagccttgagtggattggattcttttatccttacaacggtaatactgtctacagccagaagttcaagagcaaggccacattgactgtagacaattcctccagcacagcctacatggagctccgcagcctgacatctgaggactctgcagtctattactgtgcaagacttaactgggagggctactggggccaaggcaccaccctcacvgtntcntcn

SEQ ID NO: 363 - protein, 115 aa, Mus musculus
  misc_feature (112)..(112): The 'Xaa' at location 112 stands for Thr.
  misc_feature (114)..(114): The 'Xaa' at location 114 stands for Ser.
  misc_feature (115)..(115): The 'Xaa' at location 115 stands for Ser.
EVQLQQSGPELVKPGASVKISCKASGYTFTDYNMHWVKQSHGKSLEWIGFFYPYNGNTVYSQKFKSKATLTVDNSSSTAYMELRSLTSEDSAVYYCARLNWEGYWGQGTTLXVXX

SEQ ID NO: 364 - DNA, 336 bp, Mus musculus
  misc_feature (1)..(336): SC16.143 VL
  CDS (1)..(336)
gatgttttgatgacccaaactccactctccctgcctgtcagtcttggagatcaagcctccatctcttgcagatctagtcagagcattgtacatagtaatggaaacacctatttagaatggtacctgcagaaaccaggccagtctccaaagctcctgatctacaaagtttccaaccgattttctggggtcccagacaggttcagtggcagtggatcagggacagatttcacactcaagatcagcagagtggaggctgaggatctgggagtttattactgctttcaaggttcacatgttccgctcacgttcggtgctgggaccaagctggagctgaaa

SEQ ID NO: 365 - protein, 112 aa, Mus musculus
DVLMTQTPLSLPVSLGDQASISCRSSQSIVHSNGNTYLEWYLQKPGQSPKLLIYKVSNRFSGVPDRFSGSGSGTDFTLKISRVEAEDLGVYYCFQGSHVPLTFGAGTKLELK

SEQ ID NO: 366 - DNA, 357 bp, Mus musculus
  misc_feature (1)..(357): SC16.143 VH
  CDS (1)..(357)
caggtccagctgcagcagtctggacctgagctggtgaagcctggggcttcagtgaggatatcctgcaaggcttctggctacaccttcacaagctactatatacactgggtgaagcagaggcctggacagggacttgagtggattggatggatttatcctggaaatggtaatactaagtacaatgagaagttcaagggcaaggccacactgactgcagacaaatcctccagcacagcctacatgcagatcagcagcctgacctctgaggactctgcggtctatttctgtgcaagagagagatggttactactatggtttgcttactggggccaagggactctggtcactgtctctgca

SEQ ID NO: 367 - protein, 119 aa, Mus musculus
QVQLQQSGPELVKPGASVRISCKASGYTFTSYYIHWVKQRPGQGLEWIGWIYPGNGNTKYNEKFKGKATLTADKSSSTAYMQISSLTSEDSAVYFCARERWLLLWFAYWGQGTLVTVSA

SEQ ID NO: 368 - DNA, 321 bp, Mus musculus
  misc_feature (1)..(321): SC16.144 VL
  CDS (1)..(321)
agtattgtgatgacccagactcccaaattcctgcttgtatcagcaggagacagggttaccataacctgcaaggccagtcagagtgtgagtaatgatgtaggttggtaccaacagaagccagggcagtctcctaaactgctgatatactatgcatccaatcgctacaatggagtccctgatcgcttcactggcagtggatatgggacggatttcactttcaccatcagcactgtgcaggctgaagacctggcagtttatttctgtcagcaggattatagctctccgtggacgttcggtggaggcaccaagctggaaatcaaa

SEQ ID NO: 369 - protein, 107 aa, Mus musculus
SIVMTQTPKFLLVSAGDRVTITCKASQSVSNDVGWYQQKPGQSPKLLIYYASNRYNGVPDRFTGSGYGTDFTFTISTVQAEDLAVYFCQQDYSSPWTFGGGTKLEIK

SEQ ID NO: 370 - DNA, 354 bp, Mus musculus
  misc_feature (1)..(354): SC16.144 VH
  CDS (1)..(354)
cagatccagttggtgcagtctggacctgagctgaagaagcctggagagacagtcaagatctcctgcaaggcttctgggtataccttcacaaactatggaatgaactgggtgaagcaggctccaggaaagggtttaaagtgggtgggctggataaacacctacactggagagccaacatatgctgatgacttcaagggacggtttgccttctctttggaaacctctgccagcactgcctatttgcagatcgacaacctcaaaaatgaggacacggctacatatttctgtgcaagagtgggggattacgtcggctttgactactggggccaaggcaccactctcacagtctcctca

SEQ ID NO: 371 - protein, 118 aa, Mus musculus
QIQLVQSGPELKKPGETVKISCKASGYTFTNYGMNWVKQAPGKGLKWVGWINTYTGEPTYADDFKGRFAFSLETSASTAYLQIDNLKNEDTATYFCARVGDYVGFDYWGQGTTLTVSS

SEQ ID NO: 372 - DNA, 321 bp, Mus musculus
  misc_feature (1)..(321): SC16.147 VL
  CDS (1)..(321)
gatatccagatgacacagactgcatcctccctgtctgcctctctgggagacagagtcaccatcagttgcagggcaagtcaggacattaacaattatttaaactggtatcagcagaaaccagatggaactgttaaactcctgatctactacacatcaagattacactcaggagtcccatcaaggttcagtggcagtgggtctggaacagattattctctcaccattagcatcctggaacaagaagatattgccacttacttttgccaacagggtgatacgcttccgtggacgttcggtggaggcaccaagctggaaatcaaa

SEQ ID NO: 373 - protein, 107 aa, Mus musculus
DIQMTQTASSLSASLGDRVTISCRASQDINNYLNWYQQKPDGTVKLLIYYTSRLHSGVPSRFSGSGSGTDYSLTISILEQEDIATYFCQQGDTLPWTFGGGTKLEIK

SEQ ID NO: 374 - DNA, 351 bp, Mus musculus
  misc_feature (1)..(351): SC16.147 VH
  CDS (1)..(351)
cagatccagttggtgcagtctggacctgagctgacgaagcctggagagacagtcaagatctcctgcaaggcctctggatataccttcacagactattcattgcactgggtgaagcaggctctaggaaagggtttaaagtggatgggctggataaacactgagactggtgagccagcatatgcagatgacttcaagggacggtttgccttctctttggaaacctctgccagcactgcctatttgcagatcaacgacctcaaaaatgaggacacgactacatatttctgtggtatttacgacgggtatgctatggactactggggtcaaggaacctcagtcaccgtctcctca

SEQ ID NO: 375 - protein, 117 aa, Mus musculus
QIQLVQSGPELTKPGETVKISCKASGYTFTDYSLHWVKQALGKGLKWMGWINTETGEPAYADDFKGRFAFSLETSASTAYLQINDLKNEDTTTYFCGIYDGYAMDYWGQGTSVTVSS

SEQ ID NO: 376 - DNA, 318 bp, Mus musculus
  misc_feature (1)..(318): SC16.148 VL
  CDS (1)..(318)
caaattgttctcacccagtctccagcaatcatgtctgcatctccaggggagaaggtcaccatgacctgcagtgccagctcaagtgtaagttacatgtactggtaccagcagaagccaggatcctcccccagactcctgatttatgacacatccaacctggcttctggagtccctgttcgcttcagtggcagtgggtctgggacctcttactctctcacaatcagccgaatggaggctgaagatactgccacttattattgccaggagtggagtaataatccgctcacgttcggtgatgggaccaagctggagctgaaa

SEQ ID NO: 377 - protein, 106 aa, Mus musculus
QIVLTQSPAIMSASPGEKVTMTCSASSSVSYMYWYQQKPGSSPRLLIYDTSNLASGVPVRFSGSGSGTSYSLTISRMEAEDTATYYCQEWSNNPLTFGDGTKLELK

SEQ ID NO: 378 - DNA, 354 bp, Mus musculus
  misc_feature (1)..(354): SC16.148 VH
  CDS (1)..(354)
cagatccagttggtgcagtctggacctgagctgaagaagcctggagagacagtcaagatctcctgcaaggcttctgggtataccctcacaaactatggaatgaactgggtgaagcaggctccaggaaagggtttaaagtggatgggctggataaacacctacactggagagccaacatatgctgatgacttcaagggacggtttgccttctctttggaaacctctgccaggattgtctatttgcagatcaacaacctcaaaaatgaggacacggctacatatttctgtgcaaaatatgaggcccacgaggggtttgtttattggggccaagggactctggtcactgtctctgca

SEQ ID NO: 379 - protein, 118 aa, Mus musculus
QIQLVQSGPELKKPGETVKISCKASGYTLTNYGMNWVKQAPGKGLKWMGWINTYTGEPTYADDFKGRFAFSLETSARIVYLQINNLKNEDTATYFCAKYEAHEGFVYWGQGTLVTVSA

SEQ ID NO: 380 - DNA, 321 bp, Mus musculus
  misc_feature (1)..(321): SC16.149 VL
  CDS (1)..(321)
gacatccagatgaaccagtctccatccagtctgtctgcatcccttggagacacaattaccatcacttgccatgccagtcagaacattaatgtttggttaagctggtaccagcagaaaccaggaaatattccaaaactattgatctataaggcttcccacttgcacacaggcgtcccatcaaggttgagtggcagtggatctggaacaggtttcacattaaccatcagcagcctgcagcctgaagacattgccacttactactgtcaacagggtcaaagttatccattcacgttcggctcggggacaacgttggaaataaaa

SEQ ID NO: 381 - protein, 107 aa, Mus musculus
DIQMNQSPSSLSASLGDTITITCHASQNINVWLSWYQQKPGNIPKLLIYKASHLHTGVPSRLSGSGSGTGFTLTISSLQPEDIATYYCQQGQSYPFTFGSGTTLEIK

SEQ ID NO: 382 - DNA, 348 bp, Mus musculus
  misc_feature (1)..(348): SC16.149 VH
  CDS (1)..(348)
caggtgcagctgaaggagtcaggacctggcctggtggcgccctcacagagcctgtccatcacttgcgctgtctctgggttttcattaaccagctttggtgtacactgggttcgccagcctccaggaaagggtctggagtggctgggagttatatgggctggtggaagcacaaattattattcggctctcatgtccagactgagcatcagcatagacaactccaagagccaagttttcttaaagatgaacagtctgcaaactgatgacacagccatgtactactgtgccagagactgggagggctggtttgcttactggggccaagggactctggtcactgtctctgca

SEQ ID NO: 383 - protein, 116 aa, Mus musculus
QVQLKESGPGLVAPSQSLSITCAVSGFSLTSFGVHWVRQPPGKGLEWLGVIWAGGSTNYYSALMSRLSISIDNSKSQVFLKMNSLQTDDTAMYYCARDWEGWFAYWGQGTLVTVSA

SEQ ID NO: 384 - DNA, 339 bp, Mus musculus
  misc_feature (1)..(339): SC16.150 VL
  CDS (1)..(339)
gacattgtgatgtcacagtctccatcctccctaactgtgtcagttggagagaaggttactatgagctgcatgtccagtcagagccttttatatagtagcactcaaaagaactacttggcctggtaccagcagaaaccagggcagtctcctaaactgctgatttactgggcatccactagggaatctggggtccctgatcgcttcacaggcagtggatctgggacagatttcactctcaccatcagcagtgtgaaggctgaagacctggcagtttattactgtcagcaatattatagctatccgtacacgttcggaggggggaccaagctggaaataaaa

SEQ ID NO: 385 - protein, 113 aa, Mus musculus
DIVMSQSPSSLTVSVGEKVTMSCMSSQSLLYSSTQKNYLAWYQQKPGQSPKLLIYWASTRESGVPDRFTGSGSGTDFTLTISSVKAEDLAVYYCQQYYSYPYTFGGGTKLEIK

SEQ ID NO: 386 - DNA, 351 bp, Mus musculus
  misc_feature (1)..(351): SC16.150 VH
  CDS (1)..(351)
gagatccagctgcagcagtctggacctgagctggtgaagcctggggcttcagtgaaggtatcctgcaaggcttctggttatgcattcactagctacaacatgtactgggtgagtcagagccatggaaagagccttgagtggattggatatattgatccttacaatggtggcactagctacaaccagaagttcaggggcaaggccacattgactgttgacaagtcctcaagcacagcctacatgcatctcaacagcctgacatctgaggactcggcagtctattattgtgcaagagagaactataggtactttgacttctggggccaaggcaccactctcacagtctcctca

SEQ ID NO: 387 - protein, 117 aa, Mus musculus
EIQLQQSGPELVKPGASVKVSCKASGYAFTSYNMYWVSQSHGKSLEWIGYIDPYNGGTSYNQKFRGKATLTVDKSSSTAYMHLNSLTSEDSAVYYCARENYRYFDFWGQGTTLTVSS

SEQ ID NO: 388 - DNA, 318 bp, Artificial Sequence
  Humanized antibody sequence
  misc_feature (1)..(318): HSC16.13 VL
  CDS (1)..(318)
gacatccagatgacccagtctccatcctccctgtctgcatctgtaggagacagagtcaccatcacttgcagtgcaagtagcagcgttagctatatgtattggtatcagcagaaaccagggaaagcccctaagctcctgatctacctcactagtaacttggcaagtggggtcccatcaaggttcagtggcagtggatctgggacagatttcactctcaccatcagcagtctgcaacctgaagattttgcaacttactactgtcaacagtggcgtagtaacccattcacgttcggccaggggacaaagttggaaataaaa

SEQ ID NO: 389 - protein, 106 aa, Artificial Sequence
  Synthetic Construct
DIQMTQSPSSLSASVGDRVTITCSASSSVSYMYWYQQKPGKAPKLLIYLTSNLASGVPSRFSGSGSGTDFTLTISSLQPEDFATYYCQQWRSNPFTFGQGTKLEIK

SEQ ID NO: 390 - DNA, 372 bp, Artificial Sequence
  Humanized antibody sequence
  misc_feature (1)..(372): HSC16.13 VH
  CDS (1)..(372)
cagatcaccttgaaggagtctggtcctacgctggtgaaacccacacagaccctcacgctgacctgcaccttctctgggttctcactcagcactagtggaatgggtgtgggctggatccgtcagcccccaggaaaggccctggagtggcttgcacacatttggtgggatgatgttaagcgctacagcccatctctgaagagcaggctcaccatcaccaaggacacctccaaaaaccaggtggtccttacaatgaccaacatggaccctgtggacacagccacatattactgtgcacgcatagtttcctttgataacgacgttgtctctgctatggactactggggtcaaggaaccctagtcaccgtctcctcc

SEQ ID NO: 391 - protein, 124 aa, Artificial Sequence
  Synthetic Construct
QITLKESGPTLVKPTQTLTLTCTFSGFSLSTSGMGVGWIRQPPGKALEWLAHIWWDDVKRYSPSLKSRLTITKDTSKNQVVLTMTNMDPVDTATYYCARIVSFDNDVVSAMDYWGQGTLVTVSS

SEQ ID NO: 392 - DNA, 321 bp, Artificial Sequence
  Humanized antibody sequence
  misc_feature (1)..(321): HSC16.15 VL
  CDS (1)..(321)
gccatccagttgacccagtctccatcctccctgtctgcatctgtaggagacagagtcaccatcacttgccgggcaagtgagaacatttattataatttagcctggtatcagcagaaaccagggaaagctcctaagctcctgatctatactgccaatagtttggaagatggggtcccatcaaggttcagcggcagtggatctgggacagatttcactctcaccatcagcagcctgcagcctgaagattttgcaacttatttttgtaaacaggcttatgacgttcctccgacgttcggtggaggcaccaagctggaaatcaaa

SEQ ID NO: 393 - protein, 107 aa, Artificial Sequence
  Synthetic Construct
AIQLTQSPSSLSASVGDRVTITCRASENIYYNLAWYQQKPGKAPKLLIYTANSLEDGVPSRFSGSGSGTDFTLTISSLQPEDFATYFCKQAYDVPPTFGGGTKLEIK

SEQ ID NO: 394 - DNA, 351 bp, Artificial Sequence
  Humanized antibody sequence
  misc_feature (1)..(351): HSC16.15 VH
  CDS (1)..(351)
caggtgcagctggtgcagtctggggctgaggtgaagaagcctggggcctcagtgaaggtttcctgcaaggcatctggatacaccttcaccaggtactggatacactggatacgacaggcccctggacaagggcttgagtggatgggatacatcaaccctacaactgtttatactgagttcaatcagaacttcaaggacagagtcaccatgaccagggacacgtccacgagcacagtctacatggagctgagcagcctgagatctgaggacacggccgtgtattactgtgcgagaggcggtagtaacttctttgactactggggccaaggcaccactgtcacagtctcctca

SEQ ID NO: 395 - protein, 117 aa, Artificial Sequence
  Synthetic Construct
QVQLVQSGAEVKKPGASVKVSCKASGYTFTRYWIHWIRQAPGQGLEWMGYINPTTVYTEFNQNFKDRVTMTRDTSTSTVYMELSSLRSEDTAVYYCARGGSNFFDYWGQGTTVTVSS

SEQ ID NO: 396 - DNA, 318 bp, Artificial Sequence
  Humanized antibody sequence
  misc_feature (1)..(318): HSC16.25 VL
  CDS (1)..(318)
gaaattgtgctgactcagtctccagactttcagtctgtgactccaaaggagaaagtcaccatcacctgcagtgccagtagcagtgtgagctacatgcactggtaccagcagaaaccagatcagtctccaaagctcctcatcaaggatagttccaaactcgcctcaggggtcccctcgaggttcagtggcagtggatctgggacagatttcaccctcaccatcaatagcctggaagctgaagatgctgcaacgtattactgtcagcagtggagtagtaacccgctcacgttcggtcaggggaccaagctggagatcaaa

SEQ ID NO: 397 - protein, 106 aa, Artificial Sequence
  Synthetic Construct
EIVLTQSPDFQSVTPKEKVTITCSASSSVSYMHWYQQKPDQSPKLLIKDSSKLASGVPSRFSGSGSGTDFTLTINSLEAEDAATYYCQQWSSNPLTFGQGTKLEIK

SEQ ID NO: 398 - DNA, 372 bp, Artificial Sequence
  Humanized antibody sequence
  misc_feature (1)..(372): HSC16.25 VH
  CDS (1)..(372)
cagatcaccttgaaggagtctggtcctacgctggtgaaacccacacagaccctcacgctgacctgcaccttctctgggttctcactcagcactagtggaatgggtgtgggctggatccgtcagcccccaggaaaggccctggagtggcttacagacatttggtgggatgataataagtactacaacccatctctgaagagcaggctcaccatcaccaaggacacctccaaaaaccaggtggtccttacaatgaccaacatggaccctgtggacacagccacatattactgtgcacgaagagttaactattattacgacccgtactatgctatggactactggggtcaaggaaccctagtcaccgtctcctca

SEQ ID NO: 399 - protein, 124 aa, Artificial Sequence
  Synthetic Construct
QITLKESGPTLVKPTQTLTLTCTFSGFSLSTSGMGVGWIRQPPGKALEWLTDIWWDDNKYYNPSLKSRLTITKDTSKNQVVLTMTNMDPVDTATYYCARRVNYYYDPYYAMDYWGQGTLVTVSS

SEQ ID NO: 400 - DNA, 321 bp, Artificial Sequence
  Humanized antibody sequence
  misc_feature (1)..(321): HSC16.34 VL
  CDS (1)..(321)
gacatccagatgacccagtctccatcctccctgtctgcatctgtaggagacagagtcaccatcacttgcaaggcgagtcagagcgttagcaatgatgtagcctggtatcagcagaaaccagggaaagttcctaagctcctgatctattatgcatccaataggtactcaggggtcccatctcggttcagtggcagtggatctgggacagatttcactctcaccatcagcagcctgcagcctgaagatgttgcaacttatttctgtcagcaggattatagctctccgtggacgttcggtggaggcaccaaggtggaaatcaaa

SEQ ID NO: 401 - protein, 107 aa, Artificial Sequence
  Synthetic Construct
DIQMTQSPSSLSASVGDRVTITCKASQSVSNDVAWYQQKPGKVPKLLIYYASNRYSGVPSRFSGSGSGTDFTLTISSLQPEDVATYFCQQDYSSPWTFGGGTKVEIK

SEQ ID NO: 402 - DNA, 354 bp, Artificial Sequence
  Humanized antibody sequence
  misc_feature (1)..(354): HSC16.34 VH
  CDS (1)..(354)
caggtccagcttgtgcagtctggggctgaggtgaagaagcctggggcctcagtgaaggtttcctgcaaggcttctggatacaccttcactaactatggtatgaattgggtgcgccaggcccccggacaaaggcttgagtggatgggatggatcaacacttacactggtgacccaacatatgcagatgatttcaagggcagagtcaccattaccagggacacatccgcgagcacagcctacatggagctgagcagcctgagatctgaagacacggctgtgtattactgtgcgagaattggcggtaatagtccctctgattactggggccaaggcaccactgtcacagtctcctca

SEQ ID NO: 403 - protein, 118 aa, Artificial Sequence
  Synthetic Construct
QVQLVQSGAEVKKPGASVKVSCKASGYTFTNYGMNWVRQAPGQRLEWMGWINTYTGDPTYADDFKGRVTITRDTSASTAYMELSSLRSEDTAVYYCARIGGNSPSDYWGQGTTVTVSS

SEQ ID NO: 404 - DNA, 321 bp, Artificial Sequence
  Humanized antibody sequence
  misc_feature (1)..(321): HSC16.56 VL
  CDS (1)..(321)
gagatcgtgatgacccagtcccctgccacactgtccgtgtcccctggagagagggccaccctgtcctgcaaggcctcccagtccgtgtccaacgacgtggtgtggtaccagcagaagcccggacaggctcccaggctgctgatctactacgcctccaacaggtacaccggcatccctgccaggttctccggatccggatccggcaccgagttcaccctgaccatctcctccctgcagtccgaggacttcgccgtgtactactgccagcaggactacacctccccctggacctttggccagggcaccaagctggagatcaag

SEQ ID NO: 405 - protein, 107 aa, Artificial Sequence
  Synthetic Construct
EIVMTQSPATLSVSPGERATLSCKASQSVSNDVVWYQQKPGQAPRLLIYYASNRYTGIPARFSGSGSGTEFTLTISSLQSEDFAVYYCQQDYTSPWTFGQGTKLEIK

SEQ ID NO: 406 - DNA, 354 bp, Artificial Sequence
  Humanized antibody sequence
  misc_feature (1)..(354): HSC16.56 VH
  CDS (1)..(354)
caggtgcagctggtgcagtccggcgccgaagtgaagaaacccggcgcctccgtgaaggtgtcctgcaaggcctccggctacaccttcaccaactacggcatgaactgggtgaggcaggctcctggacagggactggagtggatgggctggatcaacacctacaccggcgaacccacctacgccgacgacttcaagggcagggtgaccatgaccaccgacacctccacctccaccgcctacatggagctgaggtccctgaggtccgacgacaccgccgtgtactactgcgctaggattggcgactcctccccctccgattactggggacagggcaccctcgtgaccgtctcctcc

SEQ ID NO: 407 - protein, 118 aa, Artificial Sequence
  Synthetic Construct
QVQLVQSGAEVKKPGASVKVSCKASGYTFTNYGMNWVRQAPGQGLEWMGWINTYTGEPTYADDFKGRVTMTTDTSTSTAYMELRSLRSDDTAVYYCARIGDSSPSDYWGQGTLVTVSS

SEQ ID NO: 408 - protein, 10 aa, Artificial Sequence
  HSC16.13 CDRL1
SASSSVSYMY

SEQ ID NO: 409 - protein, 7 aa, Artificial Sequence
  HSC16.13 CDRL2
LTSNLAS

SEQ ID NO: 410 - protein, 9 aa, Artificial Sequence
  HSC16.13 CDRL3
QQWRSNPFT

SEQ ID NO: 411 - protein, 11 aa, Artificial Sequence
  HSC16.15 CDRL1
RASENIYYNLA

SEQ ID NO: 412 - protein, 7 aa, Artificial Sequence
  HSC16.15 CDRL2
TANSLED

SEQ ID NO: 413 - protein, 9 aa, Artificial Sequence
  HSC16.15 CDRL3
KQAYDVPPT

SEQ ID NO: 414 - protein, 10 aa, Artificial Sequence
  HSC16.25 CDRL1
SASSSVSYMH

SEQ ID NO: 415 - protein, 7 aa, Artificial Sequence
  HSC16.25 CDRL2
DSSKLAS

SEQ ID NO: 416 - protein, 9 aa, Artificial Sequence
  HSC16.25 CDRL3
QQWSSNPLT

SEQ ID NO: 417 - protein, 11 aa, Artificial Sequence
  HSC16.34 CDRL1
KASQSVSNDVA

SEQ ID NO: 418 - protein, 7 aa, Artificial Sequence
  HSC16.34 CDRL2
YASNRYS

SEQ ID NO: 419 - protein, 9 aa, Artificial Sequence
  HSC16.34 CDRL3
QQDYSSPWT

SEQ ID NO: 420 - protein, 11 aa, Artificial Sequence
  HSC16.56 CDRL1
KASQSVSNDVV

SEQ ID NO: 421 - protein, 7 aa, Artificial Sequence
  HSC16.56 CDRL2
YASNRYT

SEQ ID NO: 422 - protein, 9 aa, Artificial Sequence
  HSC16.56 CDRL3
QQDYTSPWT

SEQ ID NO: 423 - protein, 7 aa, Artificial Sequence
  HSC16.13 CDRH1
TSGMGVG

SEQ ID NO: 424 - protein, 16 aa, Artificial Sequence
  HSC16.13 CDRH2
HIWWDDVKRYSPSLKS

SEQ ID NO: 425 - protein, 14 aa, Artificial Sequence
  HSC16.13 CDRH3
IVSFDNDVVSAMDY

SEQ ID NO: 426 - protein, 5 aa, Artificial Sequence
  HSC16.15 CDRH1
RYWIH

SEQ ID NO: 427 - protein, 17 aa, Artificial Sequence
  HSC16.15 CDRH2
YINPTTVYTEFNQNFKD

SEQ ID NO: 428 - protein, 8 aa, Artificial Sequence
  HSC16.15 CDRH3
GGSNFFDY

SEQ ID NO: 429 - protein, 7 aa, Artificial Sequence
  HSC16.25 CDRH1
TSGMGVG

SEQ ID NO: 430 - protein, 16 aa, Artificial Sequence
  HSC16.25 CDRH2
DIWWDDNKYYNPSLKS

SEQ ID NO: 431 - protein, 14 aa, Artificial Sequence
  HSC16.25 CDRH3
RVNYYYDPYYAMDY

SEQ ID NO: 432 - protein, 5 aa, Artificial Sequence
  HSC16.34 CDRH1
NYGMN

SEQ ID NO: 433 - protein, 17 aa, Artificial Sequence
  HSC16.34 CDRH2
WINTYTGDPTYADDFKG

SEQ ID NO: 434 - protein, 9 aa, Artificial Sequence
  HSC16.34 CDRH3
IGGNSPSDY

SEQ ID NO: 435 - protein, 5 aa, Artificial Sequence
  HSC16.56 CDRH1
NYGMN

SEQ ID NO: 436 - protein, 17 aa, Artificial Sequence
  HSC16.56 CDRH2
WINTYTGEPTYADDFKG

SEQ ID NO: 437 - protein, 9 aa, Artificial Sequence
  HSC16.56 CDRH3
IGDSSPSDY
